United States Patent Application Publication US 2022/0167576 A1 - sequence listing, part 8

SEQ ID NO: 30 - DNA, 35937250 bp, Oryza sativa (residues 14,797,693-16,911,648 of 35,937,250)
  misc_feature (5969519)..(5970518): n is a, c, g, or t
  misc_feature (13681864)..(13682863): n is a, c, g, or t
  misc_feature (13684155)..(13684254): n is a, c, g, or t
  misc_feature (18795366)..(18796365): n is a, c, g, or t
  misc_feature (24815509)..(24816508): n is a, c, g, or t
  misc_feature (35936251)..(35937250): n is a, c, g, or t
ttagtcccggttggtgttaccaatcgggactaaagatcacatatgcccgttgtagccaccaaccgggactaacgatcatctttagtcccggttttaaaaggatccgtgactattgtggatttcggccgaccgaccaaagatggtttgtccaccagtggctgtatcgctgttgttggcggctctggaaacagatatgattattggagtatatacataaaaataaatttatttgatttattttgaaaaggttttttatagaattattttacataaacgtactgaacagtgtagtaaacatgataatcaagccttgtttacttggggaaattttttgagtttggttttcacatcgaatatacggacacatatttaaagtattaaatatagtctaataataaaacaaattacagattctgccaggaaactgcgagacgaatttattaagcctaattaattcgtcattagcaaatgtttaccttgtcaaattatggcgcaattaggtttaaaagatttgtctcataatttacacgtaatctatgtaattattttttttttatatttaatactctatatatgtgtctaaatatttgatatgacagcgtgaaaattttagttctgttaactaaatatagagttacccaaaccgatcgaacagcccaaacgaacgggcccagtctttcacatggaagttaacgttggaagtggtgccgagtcccctgaacgggcactgcagaccatttgactatcaaattctgtggcggctttcgtaatttcattatttcttaaatcgtaattctgacacattaaattacatatatttggatgcagattgtttcggacaatgacaatttcatattgttggacaaccaccaatcacggctggtcaccggacgacaaaaatgtacgtatacgtccggcgaaagcactaaagtactccatgtttctctttacaagcctaaatatgactaaatcttgccactagcgcatgtagtagttaacctaacacgttgcttcagatgcttcgatctatgcagaaatcccaggcaaattaagatagtttattccccagtaacgtcttgttcggttaatccctctcacaatggtattgaggggatatgaaggggatttattccatctctattgggaatggaattatttatcctcaatctcctccaatctctattttttgggattaaacgaaaaaaggtcaaactgtaacctcttctatatccataattattcttgtatatttttagtggtcttggtacaagtacgaaatttttttttgcacgcgattgttaacctatttatgcatgtgtttttcgagccactgcaactaagagccaatagctatcgaggttttgccatagaaggattccattactatccattaaaatcaattttttataggcggctctaacgaaccgaccataaaatgaaacttctagttttacttttttagaaaaaagggaaaattgatgccgtatttcacgaggcatctattcatgcaagttctaagtcacacgtgagggaattttatactcaaaatatgcgaatctagaacatctctctctatgcgtatccttcttaccatcccatatgatagcatgacattggcacatgttgcacttttattttctcattgacatgaatggatataaatcaattgccaaactttaaaataatgttgattataattaatagatttgtcatcaatcatcaaaaaatgagagattataagttcaagtgtttaagattgttggtttaggtatcttaatttgatgattaatgataaatctaactatatgaggctaatgtttttgtgaacttttcttttactagtcccatttgaatatgaaaatggcatgtaataaactttccatattctaaattggtctcactcgtggatccaaaacgtagggtggacacattcatttacttatttgattatgtgcatacatgttcctttatattcttatgtttgcacatcttgaggggagctcattctatatattgatctctaccatgatttgaaattatgtcacctcatttatatattgtttacatcgggttatcatccatcaccaagaagagaaaagattaaaagatcgtacattaaataatttgcgtaattatggctttggtgatttatagtaaactaacttctatcggaagaatgtattgacgatagaagcattctatatggaatgttattagttaagtctggtgttattagtgtttataatgagcagcactttagcaggccggtgtccaaaacttgtagcttgaagatgtcaaaaagataagagaaacccactatgatatagccgtgtagccctaggaagggctctctgccgtgctgccttattatgggcgttcatattcattatcatggagtttgattcctccatgtagtatgtcacgtcctgataaattcattccgaaataaaattcattttctaaaaggaataatagaattaattaaaatttgaaaagaaattggcaaacactaaaatacgtacaagaaaaattcgaatgtggtccggagaatttttgttaaattctccttggtctaaaaggagccctcaaattttacttgaattttcagagcaccggaaataattattaagcaacaaaaacaattatcaaagtttaataaaaagaaaatctaaaaataatcctccttttcctttgggccaagtctagcccaaagcctccctcactctccctcggcccgcggccgaagtccttccctcctccctctctttttccttccctctctctctcttgggccgccctccctccttccccggcccactccctcctctccttcccggcccaccttctcccgcctcctcccgcctgggccgccgcccggcccaagccgccccacccagcctcccgagccgctcccctcccgcgtgcgcacgcgcgctgacgccgcgcgcccgaccgcgtggggcccacgcgccaggccggtcgcctccttcctcccgcccggcctccttcctctctctctctcccgtgcaaacctagagccgttcctcctccaaatccgcgcaaatcaaaccatggattccaaaattaattggggggttttaaatcccattgattcctcttcaattccccccaatttcccccttggatcgtgcccccaatcgccgggaacgcccgcgtcttctccggccgctttccatggccgccggccgccattcccgtcgccgttccaccctctcccgtgctcggctcgcttccctccgctataaaatggaatcccctcgctccgttctatcgttttagccccctcccgcgatctctcgtggtccctagccacctccccgccgtcgtcccctctctcccgtgccgccggccgtcttcagccgcccctgccgccgcgttagcacgccggccggccgtgccgtcgcctcctccagcgtcgccgccacctcctcttcgccggcctgccctccgtttcgcgcggtgaccgccggaggcgcgttcccaccgtcgcccttctctttcctccgcgccggccgcctccagccgcctctccctcctcgcccgagcgctgcccggccgtgccgtcgccttccccggcgtcgcagccgcctcctcttcgccggcctgccctctgttttccgcggggacctccggaagtgcctccccgccggcgacagtggtgttgccgccactgttccgccttcggccacctctgccgcgtcgccggtacgccgatcgacgtcgccatctcctccgtcgacgtcgcagcgttgtcctcacctccagctgctcctctgtttcgccggaacgccgtcgcccgtgccggcctccatcctcgtcgtcgccgacgtcccttcggccgccccgttcatcctcgccggctcgtcgtctcgcggcgccgcctccgtcgtcggcatcgcagcggcgtgttccacgccagcctcgcctccgtgcagccgctgccggctgccctcgtcgccttctcgccggccccggtcgtcgtcgtcgtcgtcgtcctctcgtcgtcctcatcgtcgtggcgttcgtccctccgtcaagccgttctcgttcgtcgtcctcgcttcgtcaagtgctgcagccccgtcgtcgtcttcgtcctcggctccgcgtcgtcaagcctcgtgccggccgcgtctcgccttcgtccaaggatcgccgccgaagccgtcccctcgccgttcgtctccgttgtgcccgtctgtctccaccgcgcccgttcgtcgttgtcgttcccacgcctcgtcgcgtggtggtaaggatccgtcctctcgctgccccgtcctcgtcctttcggtgtcgccccgtacccgttgtgcggttgtcgaccccggtacccgtgtaccggtgtcggtagtcgttcgcttgtgcgtgtggtgaccgtgttagtgtgcccgctcggtagccgcgtggtttccacgtgtgcagcccgtgtggtgtctagtggagtccgtttgttggccactcgcctcggttgacacacggggtccgcttccgtcgacccgtggaccgtctctgtgtacccgatctaccgcggtcctttaggttgacatgtggggtccgcatgtcaacggcgcagccttcctgtcttttccaggctagcgcttacacctgttttatagttgcaaaacctaattacaataatccgcaaatctccatataacagcattaaacttcggatgatcatatcttggtcatacgagctctgaatcgacccgttcaagtctcctaatgtttgtataacctaaagaaccctgtgctttcttcttatgtattgttattgcttctttttaggcttgtagctttgcttgtgtgcttcgcgtagctttcgtcgtttcggaggttcccgaagcgtggttcgtggtcgtcgccgaaggttcggaaggccgttctctctgagcaaggcaagtcacatcatccttgagcatattgaatcccagtttataaaattattttaatttaaattaatgcattaccgctttatttaaattcccgcgttatcactgttttatttagccatgcctatttacctttgttatgacattattattgctattgttattattaccttgttcaccctaggataaacaaaaccccaactagtgggtactctatttatggttccactagtatgaatttaggtagatgcttcgctgattaattaggcaacattaggtggttttataactttagactttgggaattctcatatcatttggacactatggaatggttggcttatggtggaattggacatacccctctcttcctctttcaaagcccctaaaacctgtttttcggtggggtttgggtgcatgccagttgtgggaagtagcaccccggccactataaggattaagctcgggcctctgttgcaaagcactaccgtacttccacatgtctagtgggtaaggcttagtttgtggctcagtctggttataaacaaaagtacacggattggagatggatgaagtcgggggtcgatggacattctccagggcaaatgaaggctacacgagctgcggcccggtagtcgagatgtcatggcacagggctggtgtcctgctgctagggggctcaatcctgcctgcctgtcccgggggttccggccgtaggtggggttgggtcggtactcttgtttatggctaggatgggttgggaactatgtcacgtcttccgtccgtataccgtggtggtatgtggcacgtggttacacgtgaggaagatgtgtcttgtgggtaaagatgtacacctctgatcagagtaaaacctattcgaatagccgcgccctcggttatgggcaagccgagcaatgtacccaagttagtgttttaattcttaaaatttgctcaacaactaaaatgtggaatggttggcctgggttggcttgggacgagctgggacccagggtcgggttgccagttcggtctgaatcatcgtaggccttgggttaaggcaggttcgtgtgggttcacgaccttgattaataatactgtgtagctttaggatcgtctttttaaaatggctttgggcaactaagtgacttttaaatgctgttttctgcaaaacttaacccctatatcattaccccttgtacccccttgcattaatcgtgcatccgccggtgtggcttgctgagtactgtggttgtactcattcttgctctatctttctccccccttcagtaagagaagctttggagaagaagtcttaggtggagtcttggcttataccccagttgagcgcctgtgaagatggagccgtaggcccgctagtccgctgctgtttatttttgatggtcaggccttaagtgcctttgtaataatgtaaatattatcgatataataaagatgtgccttttgtatcatgtttgttcggtgtaccccggcttttcctgggacggggattaatacactagcattcgggaaaaggtaattttctcggtcgcgacaagctggtatcagagccatctcgactgtaggataagcccagtggataaaaacctaaggacatattttataaataaaactatttgcgaaagttcctctttttctccttcccctaatgctatttgcaaaaggtttacccttttcttccgtcttcaattttcaactagtactagatggtcagctttgcgaagaagaagatgtcgtcagtcgtttgccgaagctccggaagactgcaggatccgctagcgaagcaaaggaagtagtgaagccagctgtgaagcaggagtgaagatcttggagaacccgtcgcagaacctaagccaccctatagggtagtgttgttagtcgtgtgttccttgcttgtgtgtgtagcgcgtggtttgcatcggtgggtggtgatgtaaccatgcttggttgtttgcttaatcaacttgcagaataagtgaaacaaacaacacatcaacaagaagagttagttcctttaaggtcctgtccctagttctggtctattctttcctggcttgtttcctctctcaccacaatccctgtaacagatgtttaacagagaaaaaggaaagaatgtcagcgggtatgcctccagtaactcaagttttcaactcaatccaccactagcctcaagagagttaacaagggcacacccttggtccattccaagcatgctgcttagttcacagcgaccattggttggaagtcgagaccaaaatcagtatgtgtttgatcgagcatttgccacccaggtcaatgagcttccaatgccagaagagcatgtccccttttgtcatgattgtagagaacaaggacactatgcccttaattgtccatgggtatatgccaaagaagccccttcctttggtttagcagggcagacatcgctaaaccagcctcctcgcaccaagtcaagcttgcagcctagtgtacaaagaagagagcccattagagagaatccattgaatcccggaaaatgctttcctcctagcctttcgtaccacgtggggtcacgtactaagcaagccaaaggcaagaagagtaagaatcagaagagaaaagcaccgatgcgaactgaagaagaagtacgtaagatgactattaccagcaccgaatggcctccagcagggataactattcctagacgtcaaagaggaaataccttccgaggtgcacgacagttgacccagcacctcctaagccatggcggcagagtatctgatagtgaagggtcagatcaagtctcctcggattatgaagatgagtctctccgacatctcggcgaggaagagatggaatcaaaagcatgcccccgttgtggagaaattggacacgttgctagcatgtgtctcacactttgccctcattgtgaggaagaccatccaccaggtggatgtcccacccgcaaggtcacatgttttctatgcgaaggtacaaaccatgtgcccaaggattgccaactcagtgtgttgttgaccaagactgcagaaatccaacgaacaaccctacgattgtctcatcagctagtcagctccaacatcaacatcgacgatatcatccccagcaccaatgctcctcctgctgcacctgactctgcagtaaatcatagcaataataccttcaacaccaaccattctctgcaccgacggcctcagcaaagaattgtcgtcgatggaagaagttgtgtctctccccgacctactccaggccgagcgaagggcaatcaatctcaggagtgcgataccaagcagaagaccgttatctgcttcaaatagcaatcagaaggaagcttctcctgtgaatgatagcaatatgcagtcctaacacatcatcacagaaccaatcaaggatgcagtcactaggacaatgccagctatatctctccagaatcaaaatgagtagccacgtttgtggtttttagttcgctacttatcattgtgtaatcgggagtttgcagcaatcatgtaataaataaatacattcatgattataaacaatgagtttgttatgtttatggaagattcatgttgaggatgcaatgtactgatgttaagcaccttccctttttgtttaaggcaaggccttgcattcatgtaataagggagacatgtgtaataaaaacaagttctatgaggattatttcggaagatgctgatatgggattatgtgtataattgtttactgtcaaaggagacctagggtctcatttcagaggaaccatgttctaacctcgagttaataaccaacctgatgatggaaaagaaaatcaagcgattaaccaaagagacatttgtttggactaagagtttcagacgtgtctttttcggatcaaaggcaatgacagtcagtatagcttttggcgaaaacacttcaaggtttcactgaaaggcagcagaccaaaggaccacatcgtcaccagaagcatccacaactctcggagtgaagagtacttggttgacaaagttccaaaggtgactaatagaagataccagcaaaggtgtttattgtcgggcaaagaagtaggtcgaaaggtgattgatacgagaaatctgaaaagaatacatcagggttgaatgtgtgaaggaatactttgaatgctaaataatgacaacatgaagagaatagcaggaagtaaactgaatgtaaagaaagtgaatccgagttgtctgttcatgggaactattcccagttatgaaccaagtgatatgttcgaagatagtctatagaggtcagattaaaatcgcatctaacagtgaagcttcagatttggcagggtaacgatcaaacaataacaagtccagcagtaaagtcatctggaaaggcgtcaaagcatgtcaagtgggataagttgactctgttgagaaacataattgaaaggcgaaaattatcgaccctcgcatcgcatagcagaagtagctagcacccggagaccaggaaaactaatatgaggcagtttgtggcaacttagaagtagatgacaagcatggtatcctagtaatgacgagctgatctcgacgcatgacatgaagtgggtaacttgtatgaggttgactccaaagatatgaactatgcgaagttctggaactgaagccccatcttcaagtgccgcaacccagtcgaagtcagctaaaggttcaaccagggacaagtcaggtgaagagaagattccatctgcaacaggagatcgagccaagcagtccagagtggagaagttgtgctaggcaagtttgttatagaagacggagcggaagaagtcaggcgagaagagaagaccgcccaacctatcttcttgctagcctcctcgaatctcggggacgagattcctgtaagggggggtggatttgtcacgtcctgataaattcattccgaaataaaattcattttctaaaaggaataatagaattaattaaaatttgaaaagaaattggcaaacactaaaatacgtacaagaaaaattcgaatgtggtccggagaatttttgttaaattctccttggtctaaaaggagccctcaaattttacttgaattttcagagcaccggaaataattattaagcaacaaaaacaattatcaaagtttaataaaaagaaaatctaaaaataatcctccttttcctttgggccaagtctagcccaaagcctccctctctctcgctcggcccgcggccgaagtccttccctcctccctctctttttccttccctctctctctcttgggccgccctccctccttccccggcccactccctcctctccttcccggcccaccttctcccgcctcctcccgcctaggccgccgcccggcccaagccgccccacccagcctcccgagccgctcccctccagcgtgcgcacgcgcgccgcacgcgcgctgacgccgcgcgcccgaccgcgtggggcccacgcgccaggccggtcgcctccttcctcccgcccggcctccttcctctctctctctctcccgtgcaaacctagagccgttcctcctccaaatccgcgcaaatcaaaccatggattccaaaattaattggggggttttaaatcccattgattcctcttcaattcccccccaatttcccccttggatcgtgcccccaatcgccgggaacgcccgcgtcttctccggccgctttccatggccgtcggccgccattcccgtcgccgttccaccctctcccgtgctcggctcgcttccctccgctataaaatggaatcccctcgctccgttctatcgttttagccccctcccgcgatctctcgtggtccctagccacctccccgccgtcgtcccctctctcccgtgccgccggccgtcttcagccgcccctgccgccgcgttagcacgccggccgtcttcagccgcccctgccgccgcgttagcacgccggccggccgtgccgtcgcctcctccagcgtcgccgccacctcctcttcgccggcctgccctccgtttcgcgcggtgaccgccggaggtgcgttcccaccgtcgcccttctctttcctccgtgccggccgcctccagccgcctctccctcctcgcccaagcgctgcccggccgtgccgtcgccttccccggcgtcgcagccgcctcctcttcgccggcctgccctctgttttccgcggggacctccggaagtgcctccccgccggcgacagtggtgttgccgccactgttccgcctctggccacctctgccgcgtcgccggtacgccgatcgacgtcgccatctcctccgtcgacgtcgcagcgttgtcctcacctccagctgctcctctgtttcgccggaacgccgtcgcccgtgccggcctccatcctcgtcgtcgccgacgtcccttcggccgccccgttcatcctcgccggctcgtcgtctcgcggcgccgcctccgtcgtcggcatcgcagcggcgtgttccacgccagccttgcctccgtgcagccgctgccggctgccctcgtcgccttctcgccggccccggtcgtcgtcgtcgtcgtcgtcctctcgtcgtcctcatcgtcgtggcgttcgtccctccgtcaagccgttctcgttcgtcgtcctcgcttcgtcaagtgctgcagccccgtcgtcgtcttcgtcctcggctccgcgtcgtcaagcctcttgccggccgcgtctcgccttcgtccaaggatcgccgccgaagccgtcccctcgccgttcgtctccgttgtgcccgtctgtctccgccgcgcccgttcgtcgttgtcgttcccacgcctcgtcgcgtggtggtaaggatccgtcctctcgctgccccgtcctcgtcctttcggtgtcgccccgtacccgttgtgcggttgtcgaccccggtacccgtgtaccggtgtcggtagtcgttcgcttgtgcgtgtggtgaccgtgttagtgtgcccgctcggtagccgcgtggtttccacgtgtgcagcccgtgtggtgtctagtggagtccgtttgttggccactcgcctcggttgacacacggggtccgcttccgtcgacccgtggaccgtctctgtgtacccggtctaccgcggtcctttaggttgacatgtggggtccgcatgtcaacggcgcagccttcctgtcttttccaggctagcgcttacacctgttttatagttgcaaaacctaattacaataatccgcaaatctccatataacagcattaaacttcggatgatcatatcttggtcatacgagctctgaatcgacccgttcaagtctcctaatgtttgtataacctaaagaaccctgtgctttcttcttatgtattgttattgcttctttttaggcttgtagctttgcttgtgtgcttcgcgtagctttcgtcgtttcggaggttcccgaagcgtggttcgtggtcgtcgccgaaggttcggaaggccgttctctctgagcaaggcaagtcacatcatccttgagcatattgaatcccagtttataaaattattttaatttaaattaatgcattaccgctttatttaaattcccgcgttatcactgttttatttagccatgcctatttacctttgttatgacattattattgctattgttattattaccttgttcaccctaggataaacaaaaccccaactagtgggtactctatttatggttccactagtatgaatttaggtagatgcttcgctgattaattaggcaacattaggtggttttataactttagactttgggaattctcatatcatttggacactatggaatggttggcttatggtggaattggacatacccctctcttcctctttcaaagcccctaaaacctgtttttcggtggggtttgggtgcatgccagttgtgggaagtagcaccccggccactataaggattaagctcgggcctctgttgcaaagcactaccgtacttccacatgtctagtgggtaaggcttagtttgtggctcagtctggttataaacaaaagtacacggattggagatggatgaagtcgggggtcgatggacattctccagggcaaatgaaggctacacgagctgcggcccggtagtcgagatgtcatggcacagggctggtgtcctgctgctagggggctcaatcctgcctgcctgtcccgggggttccggccgtaggtggggttgggtcggtactcttgtttatggctaggatgggttgggaactatgtcacgtcttccgtccgtataccgtggtggtatgtggcacgtggttacacgtgaggaagatgtgtcttgtgggtaaagatgtacacctctgatcagagtaaaacctattcgaatagccgcgccctcggttatgggcaagccgagcaatgtacccaagttagtgttttaattcttaaaatttgctcaacaactaaaatgtggaatggttggcctgggttggcttgggacgagctgggacccagggtcgggttgccagttcggtctgaatcatcgtaggccttgggttaaggcaggttcgtgtgggttcacgaccttgattaataatactgtgtagctttaggatcgtctttttaaaatggctttgggcaactaagtgacttttaaatgctgttttctgcaaaacttaacccctatatcattaccccttgtacccccttgcattaatcgtgcatccgccggtgtggcttgctgagtactgtggttgtactcattcttgctctatctttctccccccttcagtaagagaagctttggagaagaagtcttaggtggagtcttggcttataccccagttgagcgcctgtgaagatggagccgtaggcccgctagtccgctgctgtttatttttgatggtcaggccttaagtgcctttgtaataatgtaaatattatcgatataataaagatgtgccttttgtatcatgtttgttcggtgtaccccggctttttcctgggatggggattaatacactagcattcgggaaaaggtaattttctcggtcgcgacatagtactgatgcagctcttgactatcagtacccattctaggtaactcatggtcgacaaaactacaaccaatggcatccctagctggagcgctccctgatctaggatcttatgtagatctagttgttttggaggtaagaatgactattacgcctttccttttcttttaaattttcctctttcacgatgcagcctgctagacaccatcagtggagatgaattggcctaagtacttttttgaaggagggcgatctacggacatttcatcgaagtctgtagcgtgggactgaaaatgagcttcattggccagaggaggtcaaggaactttagctgtcgaaccagagcaaattcggaatgctgctaatttgaccttggagtaatctttatgatgatgagtgttggtatttgatacgatcaaacaaacatccgcaagtgcacgaatactgatgtagcagttccccttagagtattctaagggtatcgaacacgagaaacgtgtgtgtactacctacgaacaaaattcaatccatgggcaacaactgatgttcgtttggctagaggtgatccctatctcttttagttagctacataagttaaaagtaaaactctatcgaatgctttgctggtacaagccctccttggtctactaggctgagtccggccttaacctctatgatgtacccgaatgtagagggatacaacggacgaataaagttgtcaccacccatcggctacctcactttccgtggagcatacaacaaacaaaggtaatttctaacctaaacacaacgcctaagttattaattactactctagtcttgcgcatgaacttcgttctttatctagagtcttagtactagagcactcagttgcacactaagcgatgagcccgcaccaatgagaatttatcccacttaaataaaataactaaagaacataagaaaacttgaatacctactttataaaaggaagcatctgctgaggtacaagcgagagaagaaggccaacaatcccggttttctccggaactccgttggatgaatgccgatagtccggcacaactccgtaaaattattaacgaggattatcttgtgcaagggcatactttgaaacattgtccaaatgtctctattgtattttctttcctagatatacaatggaaatttcgttacctaacctggaattttacttgtataattgctgggaactaaccattcctcttgtttgcacaagagggagctcgaaggataagtgtttctgccggacaacttcgagcatggcacgaaatgccgccatggagtagatgccactcattctcatcccgaagttttcgtgacttcgggcgagaatttgcggttgcccctcaacagctgggaaagcaggatttctagacaaatgagatgcatgacatgttaaaccagcatgtctgggagacccattcgtggcggcagcataccaccgactagatggtggacatcaacaccgccatacagcagaattaggccgacatgatggcttacttctgatcacagggattcaaaccccatcacgcaccccaagaagaagctagcttgagggagtgccacccccaccaagataacttatatctttacatttttgcatttgcatcataaaaagaaaaaaaagtaaaaatttgcaaaacataaaaataccaaaaatatttacttttgtatacgtgataagaatgttttaagttttcccagttgaaatgacgaatagttgcgatgtttttatttctatctagtacttagtttggagcttaaccttcactatagtttttgagtttgttagttaaaaacaaaatctttgccatgaacttgaaacttgtgggttgcaaaaagcatgatccaagtctagattgttgttggatatgagttggtgaaatagagttgctatgatattactctaagtgatattggaatttcagagcatttttttaaaaaagtaaatttaaaagttcctcaacgatcataaattcccaccaaagccatatgatgatcttaactgaataaacatatgctcatatgccagagtcaaatggttgtgaccctggtgagattcttttcatgcttcattgatcaagatacccactcacaagtacccaccatatatgcttgatctctacattggagattagcaaaaacatacctttcacctacgatagttgtttaacctctacactaggggtgagcaacatttccatccaccacaataaatactccacgatgtcatgaaaatatctctcatagtaatttgcaataaaagatggctgaagaaaaaaaaagtcgagacaaaaggtaaaatattgtcaaccatcatgagaagaaaaaaatgaaaaaaatagttggagaaaaaaacagccacatctcaatgttagaataaaagagattttatgacaaaggagtaccatatacaccaccatatagccacacattttgcacatcttgatcaaggttgtatgatttgttttctccttggatcctctatgtgattttgcaatatatgttgctggccctcaatcctttgctgagatattctctaatttttatgacgaggaacaagaggaagttcctgacattgcgtacgaggaaaaagaagaagaggaggatgagatccaggatgagcccatgcccgaggcggctcctgctcctgagcatactgctagtggtcctgttgctggcgaccaaatggatgacgatgctcaaagtggtgacacatagattctttactatagtgacgtctccggttgtgagtgattccctcctcctgcttctctctttttggtgccttgatgccaaagggggcgaagattgcagaatggaggggattcgcacttctcttttttatccttttgcaacatcccgtcagcgggctggaagttttgggctattggtcaggaagtttggaccgggctgttgttggtattttttaacgtcacagataaaatccgcaagcgcatggaagataccgatgtagcacttcacccgggagtattccaaggtatcgatttcctcagcaaacatgtgtgttcagctcctcttcaggctcatctatggacacgaagaaaatgtagacaaatggtagagatgatttcctagtgagaaatagtgtctacggaaaactcagtttaatcctaacgcggtacttctagcactggctagctcgctgctcccagatgtcactgtactgcgtacccggacagggataactttagtgtaattacctagacaccgtgtctatgcaattaataacgactctagtgtttataactcaataaagcaatcattgtattttagtggactatagtgaacaatgatcctgcacgctaattaggaactaaccaagaataattctcacgtaggaattcttacttactcagaaagatatttctattaaagtagagtaattagcaaggtacaaaaggtaagaggagaattaccgacaactccggaattcctccgatttcttctatcttactctctccctcatgctttggtgtgttggaatgaagtgaggggtatttataggcctagaggtacctcgggaatgtggagatgctaagcatccaaaggagcatcttcactcttgagctatcatctgtcctctaagatggtttctaccagtagaaacggtcttggaaagtcggtaactaccaacctatgaaaattggggccgattgggttgttttagagttcggccgaacccttgccagttcattttgccccgaattttcttgtaggctctagtaaagattccctcaacccatgtgtatggtggatttgcccatttgaatgtgtttcgtttggtttgtgggctcaaaactccataagcttgaatatggaagtttaattcacctccttctttatgtatctcttgtctcaactttgataatttgtcacctacatctaaatatacaccaacactcgtgggaattattagaaataaaccataccactatattgcatgttttattctttcagatttatgcacgtattgacggcataaatttcgcatttagcagccatcgacagctgtgttatcccccttttaagcctatttaccttattttatctaatggattgtgtgatattcatggaaatttggtgtattgttgttttattgtttttgtgtgcttgctatgtcatatgcatctctactcatttcattatcaaacattgctgcaccacacggatgagaactgctgggaaaagctgtccacatttatcactcgtattttgcatgcctacattaagggggagctttccacatctcttttcgttcagaaataatatatattcatgattttgtaagctttaaccgagttttcatcaatcaccaaaaagttgaagattgaaagtgcatctagccccttaagattgaaaggggcaaatgattttactgagataagcacggataaatagttccaagtttgttaggtgtgagatagtgtgtagaggatgccctccccccaacaacaaatgcaaagtggcgagaggactcgaagagttatttaaaattctttttaaatttcgcatgagtctaggaaaaccgtactatcaagagaggtatcaaacaattgcctcaggtgatacaagtgcttaaaagtcatatcccacaaaacagagacacatttgcacaacacttgcacagactcaatgtcaaataacaagtgtgggctagaagttcctagcaccctggcccggaacctcttgccaccacttttcagccaaaaatcgtaagtgttgcccataagttcctagcactctagtccagaacctcctggcacctttctaatttaaaaatgtgagacggctacatgacgtcaacacaagcctatatattccccacaccccccacagctcacttttggtaattaaactttcgtttttctgtcccctaacttctcccatggtattcttgcaccctccaccttgttcttcagctccccaagtgacattgagtaagatttgagtgtggcattgtggtttgctgaagttgttgagagctaggatgacttgagcacttggagatcttcatgggctactggttggtgcttgttactcttggagagcaacctcctagatggctaggtgtcgcccgtgagcatccaagagtgtgtggattgcctagaaaagattgcgaaggttttcctcacctccacaagggaacaaggtaatgcgagtaaaattcctagctgagccttcggatgtagtcttggtagagcaatccacatccgtggtactcactagggattcaagttagttatctttgtggtcacttgaatcctagtgagtgatatagggaagtgggattgaaaaccagggacttcctcctagggttttgcttggacatctaggtaaggggttaatcgtgaccaagctattatgagttcctcaacggagagtaggattcttgtaatccaaactcttgtctcacttgtgtatgatctgtgcaattacttgagcttttttgtttcctgttgttttacttcatctccaacactttggtaagtcttggggttctatgagaattgagacttaagcctcaaagtatttgaatattggaagttcctagatagaacaccggaagttctggacaaaattagcttccagaaagttttaaggctcttgccaagaagttatgggccctgttgaatttaaccgcaatgattgatgaaattttcaggaacgcttgaacccccatataggcgacatctacgagctttcaaggaagtggctttcgcggcaaacagattcgcacatcgctggcccgacaggtcagtttcgtgctggctccactgctatcggaccacattggggccctttccattgtctctacccagcgccaccatcatcatcaacacctccgcccggggcggcaagtggaggcggtgggagggtgggagagggaaagatgtggtgggagaggaagaagtatagagattgatatgtaggacccaccgtcagattggagagtgtaaatggagaggttgttagagtggaaagtaaatttgactctttaaatttttggcaagctggccaaatgaacatttggaaaatcggatttagagaggttggagatgctcttaactatacacctttgaaagaagttatggtggtggctggtgaatctgtcactcaccaactttgttatatttctttcatctatagaattgaagtttattatgcaaagacatttacagagaatcaatgaaattgttccaaaaactttacaattagtttatttcaaataatgttagcccatgtattatttatttttatcggttgtaaaacataactatttaagttactataatacccaaacgcaatgcatatgtatggcaagtgaccatgctttaaaaccgatctgcggcggccagcaatggctcgttaataaaaagatatagcgagagcacgtacgtaggtggtgccagtgcaggggagcgtggtcgtggaaatggactttctgaacttcacggaggataagcaataaaggactggtaggaataaagcaccagtacgtccggaaaatccacataaaaaaagtgagggggaagaggtgaattaattggtgatttggtggttacatcgacttcatcatcccgacatcccgcgcatatgtattctttgtgtgtgggtgggggtaggtgaaaccccgcgcattgtcgcgggaatttagtatgataaaaaaaataacgtactcactccgttttttaatagatgacgccgttgactttttctcacatgttttaccattcgtcttattcaaaaaaaatttacgtaattataatttattttgttatgagttgttttatcactcataatactttaagtgtgatttatatcttatacatttgcataaaatttttgaataagacgaatgatcaaacatgtgagaaaaagtcaacggcgtcatctattaaaaaacggaggtagtataagatagctagataacatcagactaagtaaattaatgtggtttatgataatttacacttaaattgtagaatgatgattcaaacgtaaaaagtaaggtggtatgactttatggaataacaaaagtaaggagatagtttagaccgtagattaatcatctaaaggctaaaaataattgatgtaatatgacttaattagaggaaaaaaggagaaagataatttgaaccatagattaatcatttaagcactaagtatataagatatcataaaacataataaagatatacattgaaacattatgtgaattatattggatgataatttaacatgtttgtatttgaaaagctcttaaattataaaaactataaagatatagcatgtttgcatgatgtttaaatgtgatgattgttagtagataatgatgtggcatctttatatgttaagctcaaggagtgagtggggaataattgtatagtaagataggattacatatgaatagtgtataatgccacatacttcttccgttttgtgtcatgagtcctctgacttatttcatatcgtctaacttaacaagatcaagaaaaaattaagcaatatctaaaatattaaattagtttcaatatatctatcattgaatatatttgttttgcgttaaaaattgtactatatttctctataaactttatcaattttttttttacgtttggttaggaaaattgacaaacgacttataatatggaacttatggaatattatatagtacattaattggcaatttggttcaacttaattaatcagaagaatggagacacagtacgagctgaaaatcaaagtactcaaacaaagtaatatattttgtggactctatatatatatccatcctcggcttgaacaactaaggccttgtttagttcccaattttgttttcccaaaaacatcacatcgagtctttggcatgcatgaagcagtaaatatagattaaaagaaaaactaattgcacagtttacatgaaaatcgtgagacgaatcttttaagactaattagtccataattagccatatgtgctacagtaacccacatatggtaatgacagaataattaggcataataaattcgtctcgcggtttctaggcgagttatgaaattagttttttaattcgtgtccaaaaaacctttccgacatccggttaaacgtccgcagtaacatcccaaaatttttttttcacgaactaaacacaccctaaacgtggaaagaaagaagaaaaaaggttgcatggggagcatatacaggtacgtatagcattgaagagctaggacagaagagctaggacaggggaatagcaggattgcagtaataagctggaactgtatcaccgaacaacatagatcatcatatcagcaggtagctagcgtagagagatgacctgtacgtggagtactcgacgactacatgcgcgcgcatgtttcgcataaaagctgtgggaaggtgagagcaccttaatgcacatgtacattaaatccttaaacgtcgacatgcagagacatgcaccttaaatccttaattataccccccagctactacactactactcctacatgcattcacgtaccccagtatcgtgcagaaaacactatttgctcgatcaataacttgcccaaagcagtatacctacgtactagccatacacactactacagctactgctactatacaaacgctttaattttactctccagcagtccctccgacttagaaaacaaattttatgaaactggaatatatcacatctaattttaatttttttttgagagagtagttattaacactgcaagctcggtgaggaaggagcgacgacgacagtagcatatctttgtcactgtgtgcacgtgctcctgcgtagagatatataaccattaacaattttagggggtctttagatctagggatctaaagttttagtacgtcacatcgatattatataggatgttattggtaacgttttgtgacaagtcgataagcacgattgtagcacctaaagctttgcggtaatatggagtctccaactgtcacaaccggaaataacccaacgggcgttccttacgtgcgtgcattattccttgtcccaggaggcaaggtacaccaaaagttgatacagttcagagtttaacaagcggaagcgtaaatagttaatttattacatgggcggcgaaggcccagcacacacaaagacaaacgggaaacagcggaagactagggcgatgaccacaggcgcttgacggcaggcacgagctagacaccaaagccttcatcttccaggggctcctcttctgggtttgggaaaaaattgagcaagactgagtacaaccaccgtactcaacaagacacacccacaaatgcaggataaatgcaagggagtacaatggggttataatataaagggttagggtttgcagcaaacagcattaaaagacacttagttgctcaaagctattttgtaaatacgatcctagagctatacaagattattaaacaaggccgtgaacccacacgaacctgccttaacccaaggcctacgatgattcagaccgaactggcaacccgaccctgggtcccagctcgtcccaagccaactcaggccaaccattccacattttagttgttaagcagattttaagaattaaaacactaacttgggtacattgctcggcttgcccataaccgagggcgcggctattcgaatagattatactcagatcagaggtgtacatctttacccacaagacacatcttcctcacgtgtaaccacgtgccacataccaccacggtatacggacggaagacgtgacatagtttctaacccatcctagccatagacaagagtaccgacccaaccccacctacggccggaacctccgggacaggtaggcaggactgagcccctagcagcaggacaccggccatgtgccatgacatcttgactaccgggccgcagctcgtgtagccttcatttgccctagagatgtccatcgacccccgacttcgtccatctccatccgtgtacttttgtttataaccagactgagccacaaactaagccttacccactagacatgtggaagtacggtagtgctttgcaacagaggcccgaagaccggtccttatatggccgaggtgctactatcaaaaccatgcaccccgagcccagcctaaaacctttttgaggattttgaatagagggggaggtgtgaatccaattccacaataatccaacaattccatagtgtccaggtgataagagtattcccaaagtctagagttgtaaaccacctaatgttacctaattaaccagcgaagcatctaactaaaatcatactagtggtaccatgagtagagtgtccactagttggggttttgtttattctagggtgaacaaggaaataataacaataacaataataaggtcataacaaaggtacataggcatggctagataaaacaatgataacgcgggaatttaaataaagcgataatgcaataatttaaatcaaaataattttataaactgggattcaatatgttcaaggatgatgtgacttgccttgctcgctttcccaaacgtcggcttcaacttccacgaagagcggatcttccgaagctacaacgtctacacgaccaacggaaaagaaaaggcttttactctaataaactccatattacaagctggaacaaagcacaaaaatgggttcttgacttcttaagaaaaaattagagacttgaacggtccaattctgagttcaaatggccaagttatggtcatttgaagtttatatgctctttaaatgaatatttgcgaatttcttcatttaaattttaattttaaaagggtttattgcgtcagccgagcggagggggcgcgcggaccgggtccacgggagtggggcccacgcggcagcctcacggtccacggtggaccgggtgcacccgggctcacaccggccggcgccgtgggtcccatgcgtcagccgcacctaagggcgcgggcggctgacggccgggccccacgcggcagccactcggcgcgcccgagggcggccaagccggcgcagccggcgggaggcggcgcccgcgcccctatggtcgccggcggtggccataggcacggcggagcggcggccgagagaggggaagggaagggggaaaagaagcggcggtccacggctcaccctaggtcgacggcgacgacgaaaaaggcggccggagcggaggaaggcggcggcgcggctcgggtcgacggggtcgacggcgttccggcggtcggtgagcgaaacggaggggtggacgaggtcggcgaggatgcggcgaagccgaaggaggcggcgccgaggtgggaggtggaccggagctcgacggcgacggcagagagagagcgacggcgcgagctcgattccggcgaggaggaagggcggcgagaggcggaaacagatggaggaggtgcggggagggtttaaatagagccgggtcgagagagggtggccggggaaggggggaaaccggcgcgggaggtccggctgccatcagtggcgccggcgagatttgcgggggcaaatccgcccgtttaaacgcgagagagagagggaaaaatggggggaaagggagaggggatcacggggagtgatttccccctctttattgcacgcggagacggcgggaggcagcgggattcgcggcggcggcggcgctagggcgcgggcgaggcggcgggagcggcgggaggaaggggatgacgggtgggccccacccgtcagcgagggtggcgggcgggcccgcccgtatgaggcgcgcgcgcgggaagaggccggatgggctgcggggagaagagagggagggggagggagatgggccgagccggcccaatagggagagggagggaaaggggactttttagagtttttctttttataaaatcattttatctttgtttatttcttaataattattatttgtgctctgaaaattccactaaaatttatttacgcattttagtcttttaggaaatatacaaaaatctctcaagccttatttgacttttaactttgcaccttttaattgttggaggctttcacacggattttaattattctaggcataatttagaggatgtagtttagagtcgttttgggacgtgacaccaaccacctcgatctagccaaaaggccaaatcaagatggattttgtaaaaagaaaaggtaaaccggctagcggaaccgatttagatatcaaaatcagcctctaggccgatttagatatcaaaatcagcctctaggccgatttagatcgatatgaggataactacccgtctcgtggacaaaacggaaggttttcaggataaacctacaaagaggtgtcgcactctctattaacagtgaaaaaaaaaacaacaatattggctcggggggcaagcgcataagtttcagcatgatggagcacatcagtatctgctcatgaaagccgattgcaagaagcaaaggaagattggttttggagttatcaagacaagaaattatgaagcatgaattctcatactccaaaactggggggcatgtgttaacagtgaaatttggtaagcccggagtagtcattggcttagagtcagcatcggcttcgaagtcctgagattagccgatgagagttgtcaagtcgtcagttgtcggattcttgctatattcggttaaggaaattgatctactaaaggaagcttatccagaagagaccgagttcaaagagaatgtggcatggcaagttatctattaattaggaatagtttgttagtttccttttatctttaggaaagtgtgtttagtgtcctataaggactttatcttttccttttatctttaggaaagtttctttcttgtccgataaggacttgaatcaacccatgggtataaatatgtacacccggggtctatgtaatctatcgtcacgatcaatataattcggcgcatcgccaccttttaccttttctactttattttatcgtccggcaggacttggcacctgacgcagggctgcattggtgttcgatctccggtgaaggggtaagtccaatgtttcgccggcccaggcaattgtatcgtttacgtcggtgtcgttcaaggctacatcagtacatttgacctcttggattgcttcggtttggattatatatttgtctacctatttatcatatgtctctgttaatctagtcttagcatatcaatttagctctatcggctgcttctcgtttcagggtttctgccggtatcggctaaatcgcgttgctagatttgattagcttagacatctaccaccctgataattcagtcaacggcttgattgtctagattttatgtttcttttcatacttagtgctgcatcagttaagtttgatctactaagtcgtgtttagaaccataatctctagcctgcttcttgattgccaataagggttttttcagggtttcagccggtgagttatttgtacgttgcatcggctcatacggattgcatatacatataagttggatttagccgatgacaacaaatgtttcactgtttaatctgatcttgtggatttcatgacattggacttccagccgatgtgtgctttaacctttagatcagtgcttatttatcatatcattgctagccgattggtttatactggattataatgttattgtattacatcatcatcagccgattgcctttatatcatcatctacattggacatacagccgattgcttaaaccatatcgctatcggctggtatcggcatcggctaatatcgactatcggctggaactactccattggcttgtcagccgatcggctgttttatcggttatttacatatcttgtcagttgggggtcaaactaactggcacgcccgcatctcaccaatctttggacctgcacaggagctaagcagatctcccaggctggtgtgttcgattttttcatcaacacaaattggcacgcctggtgggatgatgatgtaataaaataacaatataatccagtataaaccaatcggctagcaatgatatgataaataagcactgatcttaaggttaaagcacatatcagctggaagtccaatgtcacgaaatccacaagattagattaaacagcgaaacctttgttgtcatcggctaaatccaacttatatgtatatgcaatccgtatgagccgatgcaacgtacaaataactcaccggctgaaaccctgaaaaaacccttattggcaatcaagaagcaggctagagattatggttctaaacacgacttagtagatcaaacttaactgatgcaacactaagtatgaaaagaaacataaaatctagacaatcaagccgttgattgaattatcagggtggtagatgtctaagctaatcaaatctagcaacgcgatttagccgataccggcagaaaccctaaaacgagaagcagccgatagagctaaattgatatgctaagactagattaacagagacatataataaataggtagacaaatatatcatccaaaccgaagcaatctaagaggtcaaatgtactgatgtagccttgaacgacaccgacgtaaacgatacaattgcctgggtcggcggaacattggacgtaccccttcaccggagatcgaacaccgatgcagccctgcgtcagatgccaagtcccgccggacgataaaataaagtagaaaaggtaaaaggtggcgatgcgccgaattatattgatcgtgaagatagattacatagaccccgggtgtacatatttatacccatgggttgattcaagtccttatcggacaagaaagaaactttcctaaagataaaaggaaaagataaagtccttataggacactaaacacactttcctaaagataaaaggaaactaacaaactattcctaattaatagataacttgccatgccacattctctttgaactcggtctcttctggataagcttcctttagtagatcaatttccttaaccgaatatagcaagaatccgacaactgacgacttgacaactctcatcggctaatctcacgactttgaagccgatgctgactctaagccgatgactactccgggcttaccaaatttcactgttaacactctcgcagcggcggcggacggtttacggcacaaactgacaaagatggactaaaactagggtaaaatagaaaacatagtaaaagaacgattcaagtagattgtattggggggttttacaatgaaccggccttgtctcttaaataagggttggtcttgccctttacagaccctcctccacgtccaactcaggatagaaactaatggaaacacgaaacatggcttcccgagcaaggaaacccgagacccgacgaaaacagactcggactcgaaccctgacggtctgaccgcccacatacctgcggtgagaccggccctactagccggtcagaccgcccacatgcctgcagtctggccggccccatgaaggaaaccgggcactttccaaactttggcaattttccccctatttcgtccataggtgccaaatttgggtgtttggacactaataaaaaatgtaatccgtcatggggtgtttggacactaataaaaaatgtaattacagaatccatcagtaaaccacgtgacgaatttactaagcctaattaatccgtcactagtaaatgtttactgtagcaacacattatcaaatcatggaacaattaggcttaaaaggtttgtctcgcaaattaatcgcaatctgtataattagttatttttttagcctatgattaatacttcatgcaggtgttcaaagattcgatgtgacagcgtgtataattttcgggcgggatctaaacacacccttaattaatgggcgtgcgtacatatatgtcactgtcagtaatagtaatatagtatgtgtacctccaagttagtatagattcttaggatgtgctatatatgctactacctctggttgcataattcattcttatattctaaacattgatatggcctgtaaaatatatctttagctatatttttttattataatatatgacataaataaatatatttttacttttgttatagtaaattataagacaaatatatatatatatatatatatatatattatattatattgtgtttaaactaaatgttttaaagttactgatagtcatagttataatagttatagaagtttaataatcttaatataaacgtcaagaattataaaatcggagggagtacgaataaacgattgctcttaactagttgatgaacaaattgcagaggaacatgttgggtttaagtcaggtacagctagtctacttctcgttacctttccttttgggggctaccaaattaatcacgttaattaattcccatccctcttcttaccttcttttttttttggggccaattatcatgccaatccagtccttgttagggtaaatggtggtaaagttaatagtactattaaaatagctttattattcaattctgacaacaacctactaacttggatgtaatttactacactctctccatccttttctaattgtaatgtactagtgtggtctttttgcaacgtactactgctggtctgcacgcctacagaggactgaaatacatgttctacctactcggagtaattattagtgcaatgactgctcctttaacctgtaccatacttatcatattactcctacatgcaccttcagggtaattatttttttaaaaaaaaacattacgtaccattactaatctttataaatacaaattatgaaggttctgatattaaccctacattaatcaagaaataaaaaggttagaaatgcccacattaataaaaaatctagtaattctacgttaattaggaagaaaaaagataaaactgtgtgttcatttgtcactatcttttaagagctccatctatcagttgtatggacgacatcttgcgcaccataaaatatatggatttattatatcagttgtattccgtttggagttttaattatttttcttcatcatgatttgataattctagaattagaaattcttatacttggtttggagtctaaattatagttttcgatgatttatatttttctaaaaatcaaaattcgtaaaatacgtaccaagttatactacgcatgcatgcatgcatgtactacgtctggagtctcgtttatacgtttatgacaatttattaattctgaatttcagaattcgtaaataccaagttacaataagtttgaagttttaattaattgtactttcgagagatttaataataactttttaattaataaatataatttgattgcactttttgaggaatttattagaaaattcaagcttttactcttattcgagaaatgaattgaggagtagcattatatcgttcctaagtacttctttacgtgctcttgaggatagattactatattgatttagtaataattaagaattatggagaggaccagggaacacttggagagagaggctaggagatggatcaagtcaagatggagatctaactcatcaagttcgagtccacttcgggcttcatagcagtccacattaaattcgtcgcctaggttgcattcggattccaattttgacgttctatatatgcatggaaagctaacgagatcatctttcgaatggatatagtcccacatcaaaattccttctgagtcaacaggaattttcaaaacaagaaggcgttcagaatctgcccggtgttgcgtcaccgtctttgggcccgttgggccatgtatcgagtcgaagtctaatagtgtcgcgtccacgggtctaatgtcgaccctaaatcctatatattcagtagctatcattatgttaggattgggttttgcttagattatttatgccttcgcagtttcgccgctagatcggtttgtgaaaccccaacttcgaatccttgataatcattcatctacaattgagttgctctttttcttgttcttgcttgtgttcttcgattcacacgcagggattagccttctcggcgaggtcgatcgagcttcaacacggttgataatcagaggagacgtgctgctacgattgcagggttcgggtcgtgttgatcggaagccggatcgtgtgtgtcaagtttccaccaaatcgatagttatcttcacctgacggaagatcgggcatcccgttgccatcatgaatcaaagttcaagcttttcaaattaaattcattagatcacataggtgatacgacatgtgtgagcaagcctagggtgatccagacgcaaatccatcacacgagcaccttcaattttgaagttttcaaaattttgttcttcacctagtattttccaagcactttgaacttgatgaaatcttgcatctttggggtctcttttcttgttttatttaattcccttgttgttgtatactgtcattcagatttttttaaaaaaaaaattcaacgtttgtttgggtggtttgaagcaaaatctacaaatttggcgtgtgctgatttttgcagactgtaagttccagtgcaagcggaagtttgatctaaatctttgagagaatcaattctatgccacttaccctacttcaacgatttgtcattgactttgtctccctctataatatgcgactgactttgtcactttctttttacaatatgtcacagctgggtggataattgtcaataaatgcctaaaatgcccttcaagtcatacaagagttgataattgtttgatcactagaagtttgaaaaaaatataaaagttttttgtgtacttaaccttcttacaaaataaataattttgtatctaagattttctttcatgtttttcttaaaaactatttttacatagtgtatgaaagagtattcacgtacaggtagccgtatcaggaaaaaaattgtatagcatgtgaatcatgatgtaaataaaagaacttaaacacaagactattttattagcataaaaaacataaattatatttttataaatttaatagatgtaaaatgaaattcttgaaatatacatacacctatatattatttacataaggaggttatgtaaaaattttcatattttttcggaaaatctagtaggtcaatcaattgtaacctcttgtaagtcctgaagggcattttgggatttttttaaaaaaagtatccaccctaatggcacactgtagaaaacaattaacatggtagataaagtcgatgctaaatcattgaactatagtaaactcagtggcatagagtggattctctcttaaacttttaagccaaagacatggtaagagtgttacgtcattgtgttgaaactgacggctctaagaggaagtgttttgaagcactttcatgtatctcatgcttccaaaaattttaaaattccaaaaggttaaatttacaacatttcataagagcctatttggtgaaaactcaaaaatccaaagtccaaaggttagcaaaatactttaaagtgtaaaagagctcttgtagtaaaaaagtatttaattaaaaatgaaaatgcatatttctaagatgttgccttcaccatgtttggcccaaagttgcatatgatgggtttagctaaatgagctgaacttcattatgaatattggcttaaattggtatttaactcatgtaagctctagatcaagtttagttttctatgtgatttgagtctctgagtgaaacttcttgtcttaaaaagcatgtaaaccacatttcttgctttcagtttgatagaaaaaattttttttttccaaataatattttgtgaaatgttcctcacaactcacaaatccaaaatcttggaattttgaaaggaaattttattgagaaaatcatggaattttgaaaggaaattttattgtttctcaatgctcttttggaagctcattttgtgtttccaaaatctgaaagctaggaatgctcgattgactacaactttgtgattttttgtgtatcatatttggttgagatatatgaggaattctccctaatgaaatttgtgcatctatttatgatcaatctccaagatttaccacaaagttttaaatcctatggactggacagtccagaatgaagctggattgttgtcataggctctccggacctcccattatatttgagagatgaagtgaataattcaagtcatcaaagaaacataatgaaacattcgacgcctcgagagaagaatattggagacattgctgggcttttagcctgccagtcaacttcagcctgagatgtgcccgtcaaaccactcgaaggcggcgaccagatgtgttacacattcaggagacttgacaaaaatggctaaagatctacaacatctcaaatattcttaacacatactcatgtgaatctacttcccaagatgtgcactagattcacactttcatcttaagcatggaaatacatagcaaaatacacttaagacgaaaataatctaaatcacaactacttcatagttacataggccgaccggcgaaataaagatatagaatagcgggaagcttgactacccaatcctcaagcacaccgactaggggtttaccccattaagttcaagtcctagaagaagcaatcgatcacccgcatcactcaaagactaaatctaaaacatgcaagcaaaagttaattcaacagcaagagtcagtacattattaaaaataatgtactggcaagtgccaagacaagcctaacaccctacttgcaaggcatataatcaaggaaggcatagtatggttctttttagcataaagcaagttttatttgcataaaacatttctaaatcagatttgctttcaaataaatttcagcaagctagtacttagcatatgggcatcaaataggcattaatcatgtataaatatacacctcattgccttccatggcagcaaggagatcattctcaaatctcatcacaatttgaaggtaaattttagcatttagaagaataaatacaagtctatactcaatacatatccacacgccgctcataaccacgagcacggctaatcgattagttttaactctgtagagtttgtacactttacccacatgatgcgaaataataatcatgcaagagcatggcacgcgatacataagtaccagatttattacccgcaacaaagcttttccaaaattcatgatttagccttacaccagcacgatacgtgttactccatcctaagccatacacgttatatgacctagaaccgttaagtggcgggcctaagccttaaacttaacgccgtggtggcggacacaacgggaactcacccacttggcacaataccgttgtattggacagacttagtcatctaaactaccacgtcggggtaaataggaagttcctctgagttatccgaactcatacacaccggcctaacagaatgtaaggctaaaccataaataatttactaagcttgggctatcccatactagcacatgtggttgtactgtatacgaaatgaactgacattgagtgaagtccgtacgtcggtttgggcgcactctccccctatcggtacacaactaatcaccatatgtgcaccacttgaggcccaaacctaaattccatgttttccaccattttatttatcaaaaacacaagtattaaagttctgtccagattatttcaaaatcaattttcatatttgtaatgagcccataatgacaaggaagaccattctaagcatggctaagcattatagtaacctagtgactccaaaattcatatataaagtggtatagtcatattgttcctaaggttaggaatgatggatatggatatatgtggggttaaggtgataatgcaaataataggagtttgtctaacaagtttaacacaattttaatttgttagtgtacaatcgacatgcaagatttggaaacattttcaataacctccaaaacataggttcaaagtgatcaaagagagggaggtggaacttgccttgaatcaggaaaatgtcagcacctaaatcacttattcactgtttaagcaatcatctatacaaagtacacgttatgcaattaaacaccgaaatatgcgaaaaatccaaaatgctctaaaatgcatgatttgtgcacagtggataagtgctggtataaaatgaatttaggtgaaataatttatattttatctcatttcatttgagagttatgaattttagaagtttcgtcggtatagtgtaggatttacttaggtactattgcgaaatgcttgtgaaatgctgttgtaagatgattcttattaagtttatgtttgctgaggtgaagatatgtgttttctaagactaacacatttggtttcataatttttagagttaatatgaattctttatgtattttacaagttataacgtgttataggtgtatagtgttctataggttcatggctttagaggtttaggtccagaacttgcctcatctagctagttatgtataatataagtcttttatttaactaatctaatcttagtttataaattttagagttcaaattactttacttcacattttataagctaggggatattctatgctagaaacttaatatatcaatctagagattattatatgagtaaagggtactaagttttggaggaaggggatggatcttatgccttcactggttcaacaagttttagttgggtttcattatagttagagtgtattcctatatacatttatatatacgtattgcttaatccttactatgtgattagcacctatcctatagatttaaagtttagagctataacctatacagaaggtgccatattttattttactatgttgaagctcaccatttgctggttctataaaaacttggttcactccatttggactaaagatgaattttctacaaattttacaaattaaaggctgctctatgttggttattacttacataaatatttagaggcttttattgtacagtaagcatatatttttattttataacttggaagtatatgttttggtgattctacagaacttgggtatactaaaaaggatctaagatgaattttatataaacttctaaagttcagcttatgtaaaactagttattttaaagataatagttttagaggcattatatttgatgtaaagtgtgtatatgttctattttactttgtttttaaagaacatgttggtggatctgtagaaactaagtttgctctaaaatgagttgttttcaatttgttatagattttacaagtttacatgtttttctgttgaaaatataaagctttaggcatttcatttagatttttccagaatttaaatagattgggtccacaggtcagtctcaggccaatatgcaaaaaggaccctagggtttcaggaaatcaacccgcagtcctgtgactgttctgtgtgtgaggtaggttttacaaactagtacctagagttttgattcttctcaacagaggtccttggtttgagcagacagagctagccatggccgagctcgttctcaagctcgccggtggcaaacggcggcagatctcggtgtgcaacataaggagaaaatgtaaaggggttcaaggcgaggctataggtggtattcttgcaagcattggtcatcggaattaatggcgacggcggcgcgagcggcggtggttctcgggtgacggtgcatgtggagctagagcattgatctagatgtttagctacatgcatgtgcctctatgggatcctaggatgcttaccgagcgtccaatgaaacttggcgaggtccagatagcgatgaccacgagcagaacgactcagcgacggcggggagcctcgggcaatgacgacgccggcttgatatggctgatgatcttccatgcatgcatacacacggtgttgaataggtctcaggaaagcttcatgcccgaggaattgaactgtgactcaccggagagggagaaatcgaaggtggagcttgacggccggaattggggaagacgatgccgatctccaagctcgctgcaccactgccaggggttcatgagggatttaagagaggacactgaggagatgttgatggtgcggtggctcggctcggcttcctccggttcgacggcaacgaagacgatgtcccgatggcggcgcccagtgcgcgctccagagcatcgtcggcgaggcttgcgttcccaccaaaccactgcatgaaatgggatgaaacttagagggatggaatcggcgtggagaggcgataatggaacgcaaaagaagaggaaacgaccgctgcacaatggcgatggtgacggccgtcgtcttcacggcaggcggcaaggtcgagatggaaaagaaaagccggagctctccccctcggtttgctcggctcaggagtggtaatggggaggaggcgatgcagctgggtggaggtgaagccttggttcggcgctgccacgtcgaggccacgcatcgacgccgtccagtgtaggtcggcgccctcggtctctctctcggctgtcactgtgttggatggaggatgcacagggtgtggttcaagccaaagaggctgccatgtgggcccaggtctatgtaagctaggtgggagtctgagggatgggtaagaaactgggtattgattgaattttggacgattttcatattaattctctccctccaactttacatctcaatattttaatgtgtgaagcatataaattagtgtgggtttttctgaaggtagatgaatgtagctagtttccattttctttgttgcacttaaaaatttagattgctcatagaaaattggggaagatgggctcaatagaactttgtttgaatttttagaagacctaaactaagaggataaattctagaaaaaatatatttattcatgataattgacctagtattttaataaattatttcccctatacactttcatgcagttaaatgcacattttagttatgtatggttttagctgattaagaactatatttaatctattatttgacaagtttgacttgtttatttaaggtatcaaatttagttattaaattgtaccaaaattatagtgagttgtatatgttaagtagagcctacataaattttcccatgattttatcttgcacgaattattttagaaaattagcaagacttatctcttatatgtgtttcccttttcctaaatgtatgtaaatgcttataaaagttttatttggactctttttaacctgaggtgatgttgatgttgatatgttagaattacagtttaccttacacaggtcataagctctttacctatttatgcataagtttactttaatattaaattaagaggatgcttatagagatgattaagatagaatataccctatatgggttaatttatttgttcactttcatgttcatgacatgtcttcaaatggatgaccaaattagttttgtgaggcttgacattagccatgttgatatattttaaggtgtatggttcctattttaacttcgtctagctagcactaggccctaatggtttagttgtttatcgttaatattcatgagacctattatgaaatgcaaataaaaaatccaaatgcatatgaaggactcaagtcaaacatggctatgagaatatgcatatgagagtatgcatgcttacacagacgtttacattttgtcctaggttataaatgaaaaggttttaatttgttctcaaattttattcatgcaagagttagatcaacttcacctaggtttaaaatggaaatttttggctctcaaaaatgtaaaggttagcttccaactattttgacatgaaaattttaaggtctagaattttgggtatgttacaattgttttactggcatcacggaagttccaatactgattggtatttgttacgattatagataaatcctaaagtggatggatatccctgtagcattcaacccatgagtattcaagagtattgttatttgttttttatagggaaagcggcggtgtaaaaaaatggaccgttataatcgtaatcctatgattaatataccatagtctaacagagataaatgataacacacaaaagaatcatttctataaagataaattagattaagataaactagattaagaggacagaagagagccatggtttcttatgtacttctatacttacgatggttagtctacacatacattcatatacatatagaagcttaggacttggtactatgcacctaggcactaccgagaccgctccctactggtctacagcatggttacggcatttcacaaactcttacatcataccaaacgcgaaggattacaaatgatgaatagggctgtcaccacctgctgcctacctctacaacccatggggcaccccacatcctgatgaggacataactagctcggatataaccatgactaccttatgtatttattaaataaaggtgcatatgttctacattaggtttacttgttatatatttgaataaacgttgctacacaatgagttttgtgtgttttcgtttgcagaagtacttgcttgggcgaaggaaagagaccgagcgtaactaatgcatggatgattaaataagttgattggggaccaaaccaagaccttcttcaagtctacttctacctcaccacgtcactattggtccatagaagacaagagatcaagttgtacacgttttggattcggattcgggcctcctgacagcatcaacttcaaacggacctagccactgatctagaaggaatttcgaggcccatgagtacttgttggaaagattatggagtctactttcaaatggttttggtcccatgtcaaaattcctaccgagctgccgggaatctgcaaaacaagccacgtatctcatccagtccgaatctgattttgagttttgagccttgtaattgtgtcatgggcttagctcaagggggtgtgcgccctagggcaaccctatgacgtccctaagcacatttattcagtagccgtcatcgtttagagtcgggttttgcttagattattctgtcaagaacagtttcgccgctagatcggtttgtagaaccccaaattcgagtgcttaatcattcatatgcaatttggttgcaatctatcctgttcttgcttgtgttcttcgattcgcatccagggattagccttctcggcgaggtcaaccgggttttggcacggttgataaccagaggagacgtggtgctgcgattgccgggctcagtagcgtgttcgttcggaagccggatcgagttgtgtcacgactccatcgaaatcgttgtttatcaatacctatcggaagatcgggacctaacccccccatcacatccaacggcatttaatcaacccaaatactatgcctactgttgacggtcgttatcgatcagtttcgaccgtcaatatcactaacaggagagaactagtgatgcttgcaatgcataaatatgttagaataataatattctactagtattaggtttactaaccttttgcagagaatgatcacaaagtagaggagaatcgacatcagcaccaatgataaatcaattggacgatgtcgagaatcagacttatgcatgaatgggccaagaactcagaattgacacgataaactgggccaaaattcataagtctgcggagaagagaagtctagtaggccaccagccaaattgtgggctggttgggccagcccaggttcggccgaacccatttctccatcgttggatgtggggtttggcagggactgtggagattatggataccccatacctacatgatatgtatatccgactgggtatggggtgccatgtataggtagaatatctttaaaaggactcgggttaaattctaaacttgaatgtcaaggaaatacccgcgatcctaatcggtaacgattgtattttatctataactacctattccgttagggatatggactgtattttgtaatacggaccccttcccctatataaggagcggtccgggtgcctcttggggcacgtttttcacccagatcatatgatcaataatacactcggcggatctatccccggacaggagtagggtattacttcttgattaaaaaggcctgaacctgtataaaattccttgtctctaaacccatccacttttccagcttgatagccaccccttttagtcttgccgaaatcttgtttcgacagttggcgtgccaggtaggggtagcatcaagttcttcgccgactagtgcaatgggttttgtttccggcatcgacaacttcgtcttccctcccgggcaggcgttccggttcggcagcctcgacttcatcaccaacgacctcggcaagatttctctcatcgactcggattcgaaccagtcgggaagaggccagatcttcgccccgttcggtatcccgaactcggccgagatctaccccaagatcatctccaccgagtcggcttcaaaccacttggacgagatccaatctactccaacacagcccgatcaagacgatggggcctatccgccaatcctgatgaagctccccgatgatttggctgctgtcttcaccacaagggcgccttctccctgtagatctatatcacatcctgattttcgtttcaggatttataaattacttaataaattattattggaatttatattaaatgatctttaatttacaagtgaagttaaatgtgggaaataaaatttcctaaatataaagcatggatggatttaatttttattaaattctccatgattaagtcaactctctgaaatcctctcggatttttcggagctcaattcctaatttttaatcatacaaagagcatttcagtaattacccacatattaaattaatcattaaatggtctaattataattttgttaagtactttgagtgtccaagtattttcaggatttttcttgaaattatttgagcattggaagtatttttaacaattcaaagatcatttaagtgattattttaattggaaaagtaataaaatcctcctcctcagcttgggccattttcggcccattccttcctttccttcctctctcttccgccggcccagtccgagcctgcatcctctcttcttctatcagccaaagtctggtttatctccctcttctaatcaggctgagaaaagaaaagcccggcaagaagtctacattccctccctgcgctactgttcatcttccagctcaggcagagcccgtggtctcccgtgccgtgcacagtgccgccgattcccttccaaaatccgacctccccgttgctcctatttccaaattggttgcgggaatggaatcgtctcaatctcctcttacttttccccaagaaatacccaaaattttctatggaaatcctttccaatttcgcggatcaaatccttccttttccggcgagaaccctaaactttcccgagtttttcccgtcgttttgggcccggacccgagctcccatggctatataaaggaccccctagtcctcctctttcgtttgccccctctcccgtggtctcccgtgcctcgtagcgccgccgccacgtgctccaccccgccgtcgtcgccggccgagctccatccgcgccgcgccgccgcctccgtcgtcgccgccggtcgccgtcaccaccgttgtgttcgcaggagcaaggtgaagctcggccgctctctccccgctgtcgccggtcaccggagccccgtcgccgccgtcgaccgaagccgccgccgccacccacttcgtcgccggccgtcgtcgttcgtcgtttggttcgagggtgagtaccgttgggttcgtctcgtcgtcctctacgtgagcatgccttccaaatccgcagccggccgctctagctcccgcaagcttgccttccgagccggccaccattgatgaggtcatcgctgacgtcatcatcgttttttttttctttttcctgtttttctaatagattaaatcttcggaaattcataactaaatcatcgtaactcggttttgagtcgttcaagttgctaaattcatctaaaatcatgatctacatgtttgtttactttatatgtactgtttatttggtttttattagtctttttcttctttttgcgtgttagcttgtcgtttctgtcgttgcgaaggttcgtgagtgcgtcgggagtgttcagaagattaattgaagaccgattattgcaagacaagtcacatagatcctaaacacaatcctttgagcatgttgatcctatacttaaattctctatttatttcaactgtgcatttattttcgaatgtcattgggtggtgtgaatctattcctttgttatggccaatttgcattgattattctattccttgataccttgggttattataacttgactagttgggctatatatatattggttcagctagatattagatatgattgcttagctatgcttagaaacattagcacacttttgagataacttatgactcattgtttaatgatggcttaatgatagttcacgatggtcaatcgtgattggttaattaattacttgccaactaaaacttgataatggtgggttgtgagcacatggttttgagagtcgtgctcatgacaattaaggaccggttcgcgagctactattgtgaaacattaaccgtgccaaccacaagccagcgtgggcaacggctttaccttttgtataacatgattcattgcggagcaccagactgagaagtggcggagataagcccacgggggtcgctggggagtccatgcctctggtttttgagggggtgattatgatccaggaatggtgcactgtggtgagttgtgttgtgcaaagggtattgtcacagcctctattcgggtactttccagtatcgcgacgcatggtagacatgatgatgaggctgtgtcttgtgggtacagtggtacacctctggccagagtaaaactattcgaatagccgtgcccgtggttatgggcgggttgagcaatgtttttcgtgattagtcccacacctctcacaataattatggatgttataactggtaacaatttgcttagctcctggtttggagttagatctgtacagccgggtatggttgttcaggatggttgggcctgtacagcatgggtgtgctgttcagtgttgattaaaatttctgattaattactctactgttttactactcttaactctttgctaaatgctgctttcgcaaatgagcctatattatgccatcctttggtatccttgtgcacttgcatatttgctgtgtggcttgctgagtatgtcatatgctcactttgcaataatcaatcaacctcagttgaagaaaaaggatccagaaggagaagacgtttggcttatatcccagttgagctgcctgtgggagtggagccggagcttcgctagattttattttccgctgcagttttcttcttagtgaggactaagtgcctcttaagtaagtatttatcgttttagttaatttgatgaatctgtatattaaattgtcagtttgtgtacctcggctgattcctggacgaggattttatgcacaaataagttcggaaattactagtgaatttccgggcgtgacaatctaggcgggatccggcctctacctcgatccagcctagctccagggaagtcggcgtcatactctagcctctcggcacggtttcgacggaacaactggatggctacctcagctcccccggcgtcgactcacggccaacggagatcattgagtacgacgacttcggctaccgtagaccgcaacctcgacgacttcgactaagactttgaagataactacacgcctctctacttcggcatcttcatggctgaaaacgagacggaagaacagcgtaaagcccgagaagcagaagaacaacgcgtgcaacaggaagccgaacgaccctgactggaagaggagcgccaagcacaagagcgagaacggctgcagcgtgagcaacaggagtgcgaacgggctgcaaaagaggctgaggaccggcgacagcacgccttggatgtcgggcgacgagcacgagaacttatcgggcagcaagacgttgagggaacggctgtttttcgcacccctcaacagaacgcggttgcagcgatcaccctcctcgacaccctcctcaaggaagacgtactcaatcaagccaatcacgtcgtcaacatcttgaaccagaccaagatcatgatctctgccttggtcccggttaactctgcaagcgtccgcacgctgactggtagccgagttccccctcttcgatctcaagactatcaccaaccaagcctcagcgtcgtcggtgcgggatccagtcgcaggagtaagggtcacgacgagcgatctgtccactcgcctcctgaatgacacagggagcatcgagttgaacgacctcgctcctcatatcgcaggcgccccgtcgatcttcgcgatactatcaaccagcgctgcgcggcaagagaatacgcttcccaccattcactagatcgctacgacaacgacgtggatggagttgctgccttcacaagcaaattgcgtcgagtggattggccagccggcttcaagccgactggaatcgagaagtatgacggcaccactaacccggagtcttggctcaccatctacggtctcgctattcgcgcagcaggacgagatagcaaagtcatggcaaactatttgcctgtggccctagcggactctgcccggtcctggcttcacggcttaccccgtggcacaatcggatcttgggcagaacttcgcgaccacttcatcgccaacttccagggtacctttgaatgccctggtacacagtttgatctctataacgttgtttagaagtctggagaatcccttcgagattacatccgacgtttttccgagcaacgcaacaagatctccgacatcaccgacgacgtcatcatcgccgccttcaccaagggcatttgccatgatgacctagtcggcaagttcgggcgcaagcctcccaggacggtcaagcagaagatgtcattaccgcgtccaagcagtcgggcaccacttggaagccgaagaaagatacgccaactacaggggggagtggaagtaccaatcacaaggatcgcaagcgtaaacccaaggaacttgtggcaactactacaccatcctcccgacaacgttcacgggtcaacacttctgacaagatcatgaactcccaatgtccgcatcatccaaactccaatcacgcggccaaagattgcttcgtctataaacagtttgcagaacaatacgccaagaatgcacgcaaggcctctgacggagatcaaagcacgttaaagaaggatgatgaagttgacgccccgactggttttcaagaccatcgcaaggaactcaaccacatctttggcggacccctgtcctatgaatccaagagaaagcaaaagctaaccgaacgggagatcaacgctattcagcccgacacgccccaatatcttcggtggtcagagacaacaattatgtttgaccgcttggatcatccttaccgtgtggtccacccagggcggtaccccctggtactagacccagtggttcgcaacgtcaagcttcgcagatccctcatcgatggtggcagtgcactcaacatccttttcgtcaagactctggacgacatgcagatccctcgcatggaattaaagccgagtaatgcgccctttcacggagtcatctcagggctatctgctacaccactcagccagatcactcttcccattactttcggcacttgggagaacttccacacagagaacatttgttttgaggacagcgtatcacgccatactcggacgcccgatgttagccaagttcatggctgtcccgcactatacctacatgatgatgaagatgcctggtcctcaaggagtcatatccctgcggagtgacatcaagcaagccgtcacgtgtgacaaggaaagctgcgagatggcccagttccgcgagatcacgctcgaccgagaagaaatccgactggctgcgtccacagcaagcgaaggagaagtgcctgcgaccaagatgccaaagagcggggcaagcgacaccaagaccaagaagattcctctagatccttctgatcctactaagactgctgtaataggcgctgagttagattgtaaataggaaagcgcgctcatcacctttcttcaaaataataaagatatctttgcgtggaaaccatttgatatgcctggtattcctagagaggtgattgagcactctttacatgtcaaggaagacgctaaaccaatcaagcaacgactccgccgtttcgcataggataggaaggatgcgatcaaggtagaattgaccaagctgttagcagcgggcttcatcaaggaagtccttcatcccgactggctggccaacccagtcctggttcagaagaagacggggcaatggcgcatgtgtgttgattacaccgacctcaacaagtcttgtcccaaagatccttttgggttacctcgcattgaccaggtagttgactcaacggccggctgtgagctactcagttttttggattgctactcgggatatcatccgatccgactaaaggaatccgactgcttaaagacttcattcatcacgcccttcggggcctactgctacatcaccatgccttttggattaaagaacgcaggagcaacttatcaacgcatgatccagagatgtttttcaactcagatcggccgcaacgtgaagcttatgtggatgacatagtcgtcaagacaaagcagaaggatgatttgattgtggatctagaagagacctttgagagcatccgcgctttcaggatgaaattaaaccctgaaaagtgcatcttcggagtaccgtcagggaagctgcttggatttatggtgtcccatagaggcatacaagccaacccggagaaaatcaatgccatcctcaaaatgaaactgccgagctcccagaaagacgtccaaaagttaactggctgcatggcggcgctcagccggttcgtctcacgactcggggagcgggggatgccttttttcaagctgttaaagaaaaccgacaatttccagtggggacccacgaaaagcctttgaagacttcaaaaaacttctcactactccaccagtcttagcttcaccacatccgcaagagcaactgttgttatacgtgtcggcaacttcccaggttgtaagcacagtcctggttgttgaacgtgaagaagaaggccatgttcaaaaagtccaacgaccaatctacttcgttagcgagattttggctgactccaagacaagataccctcaggttcaaaagctattatatggtgttttagttaccgtaaggaaattatctcactacttccaaggtaactcggttacggtggttacgtcgtttccactcggggacatacttcacaatcgcgaagcaaacgggcggatcgcaaaatgggtcttagaattgatgtctttggatatatctttcaagctgcaaacttcgatcaagtctcaagctttagctgacttcgtcgccgagtagactgagtgccaagaagacatgcccacggagaagatggagtattggactaagcattttgacgggtcgaagaggctttcaggcactagagtgggagtagttctaatttccctgactggagagaggctgagcaacgtattgtggatacatttttctacgtctcacaacgtggcggaatatgaggcgcttcttcacggactaaggattgcaatctccttggggattcggcgtctggtagttcgtggagattcttagttagttgttaatcaagtcatgaaagagtggtcctgccttgatgataacataaccgcttaccggcaagaggtacgcaagttggaagacaaattcgatagacttgagctcacccatgttcttcgacacaataatgaggcagccgatagactggctaattttggttcaaaacgagaagcagctccttccgacgtgttttgtgaacatctctacgagccaaccgtaccaaggaaagaaacaatcgaggccatggacactcaagacataagcatgattgaagccgactggagagagcccctcataagatttttgacaaaacaagaactccctcaagataaagatgaagccgagcggatctccaggcgcagcagactttatgtcatacatgagaccgagctgtacaaaaaaagtccatcaggaatcctacaacgctgtatgtctttggaggagggaagacaattggtaaaggatatacactcaggaatctgcgacaatcacgctgccacacgaaccatcgttggcaaggcttaccagcaaggttttttctggcccacagccgtgtctgacgctgacaaaattgtgcgaacatgtgagggttgtcaatttttcgcccgacaaactcatctaccggctcaggagttgcaaaccatcccgttgtcttggccgttcgcggtttgggggctcgacatggtcggcccatttaaaaaggcagtaggtggttatactcatctctttgtagctgttgacaagttttccaagtggattgaagccaaacaagttataacaatcgcggcagacaaggctagagatttcttcatcaacattgtgcaccggtttggggtacccaatcggatcatcactgataacggcactcaattcacaggcagagtatttaaagatttatgtgaggactttggcatcaaaatttgttatgcctccgtagcgcatcccatgagtaatggacaagttgaacgcgccaatggtatggtacttcaaggaataaaagcacgagtttttgatcgactgcgtccctatgctggcaaatgcgtagaacagttgccatctgtactttggtccctgcgcaccactccgagtcgggctacgggccagtcgccgtttttcctagtctatggagtggaagcgatgttgccaagtgaggtggaatttgaatcgctacggagaagaccgagtagatgatctcaaccgactggaagaagcccgtgaggcagccttaatttagtcagctcggtacttacaagggttacgccgttatcacaactgcaatgttcgatctcgagcttttttagtcggcgacctggttctgagaaaaattcaaactacacgggatcggcacaagttatctcccttgtgggaaggaccgttcataatttctgaagtcactcggccaggttcttaccgactcaagcgtgaagatggtactcatatcgacaactcttggaatattgaacatcttcgtcatttttatgcttaagcattacttttgtatcttcctctttgactgttaacatcaagttgtcccttgagttatcagtcgggggctactataataataatggagtgtgatttttatcaattcaatttgcttacttgatttatcattgccttgtttgattttttggcttagccaatgaggactgagagttttttaaaaacttttgagggttctaggctcaataaggtttgacaaaaacttttaagaaatctggagctatgttcaaaccataaagcacagcataaatttatcagtattgtacaaattgtgcctccatcatcatcatcattatcatcaaaatacaacattaatcagtttcagttttttcatcattagaattgtcagacccagttggcctgaggtcgttttcctggaacctctcaactacatcagtggctatcttgtcagcagcttttttcgcatcattgatgaggtcaagggcggcttcttcgcttgtcccgtctgcaaagccatcaacagcatcgatgtcaatcttcgggtacaaggacttggtcattgccaacgccaggctcgctctcatgcatccagcttctttgatattcttaaaataggtgtccggagcagttctcagtttgtcgaagatttcgacaacatcaattgaactcggaccgttgttattgaaaaactcgaacctggacgagtggcgtagcggcattggcgactttatctctggctccttcaagcttcttgattttgttaactaagacatcgaattgagcctgggatttgattttgcgatttgtacaaataggtttacatcaacgactaggcatgaagatgagagtggtttttgaagtgtcagctaccaataccttcgacatctttcagagccgagtccctctgttttgccaattcggccttgtctttctctagagcttggattcgcttcttcagctcagatatcttagaagcttgcactgtattgtttttcatttgtcagatgcacatggatagcaacacgaaacaagtcagacaaagatgatatttaccttttgatgaaccgctcagctcaaagttggagtcttggagcttggcgatccggtctctcacatcatgctcagtcttcttggcaagctctttagcttcgtgcagctggtttctagtggcttcaagggttccaaggtggggaactaacttttcaagggttgcagtattcgcctcattcctaagatggattctctgcaccacaaatttatctttgttcaagtaaggtgatcgacaggatgattgaggctatatatatggagacttacatttacaagacgagtggcttggccgagtgtctttttcagtaggcatacttcctcatcttccttttgcttatttattacaattccctgtggttgcatgtcgtcatcccaccacttgactaaaatgggtgggcgagaatcttcagccgattgtatccggagaacctcttcttcatcaccgatcatcggaccttagatagtcatgaataataagtgaagtaattgaagaaagtttgttggatcaaagcaggttcggaggatgtgtttacctgtgataatttccggtcgaggacgagcagttccttgcaccctaacaggagaattagttctagggctagcaccagtgtctgtcttgggagggttgttagcttgagcttctacttctaggatatctttatttggttctatacccgactggtttccagtcgggggctcctgatcagcactgacttcagtctcggccgactggtttccagtcgggggctcgttgctggtatctacattgtcggttgccggttgattattacccaggcggtcttcggcagtcggtccagtttcttctgaaggaccggtctccgtgtcagttgacgtggggtcttttccagagggatctatgtcagatggttttctacatatttgagacatgctattagctttgcttcaatagtgagtgactagcgaaacagaagaaattgctagatgatacatacctggatgacttccttatttttggcatgggacgactgggcgttttcttcttcggattggtttgctttgactgttttccagtcacccttttgttacccgtcttttccgcatcatcaccttcatcgtcacttgaaatcaatttcctcttccgagagtcagattgattagtcaacttcgaagtgtcaggttgattagcaggcttgatttttggccctccactagcctggcttgtcttccaatggggtgaatggcgttgagcaattggagggtcagatttcatcaaagcgaattcctgtgcatgatactccgagttttcagttgaccttacagaagataaaagtatgctttgagaaaagctgagttgtataagacataccggtggaggagggttgaaggcgttgtatagcactactggcagcaagtgcgaataactgaccacgatagcattcgagaagattttgtacattctctccttcatgactttaaactcaagtgaatctggatcttcacgggtggggtcatgcttgccgtcaaattcaaaggctgtgcgggatctctctttaattggccctagtcggctttttataaaatgtcgggtgatctgttctccttgcagaccctgctctttgagcctcagcatgcaatccatcagtgcaagtgcttgggctgcctcatcccccatgggaagcgaattccgggtatcttgatataccggaggcagacaagagtacccaggaaacactggctcggggttttgtacatagaaccaatttgcatgccaacatttattccaggtcttgaatggcatggagaagtatttttggctcaaggtccccctcagttgaaaactggctcccccaacaacacatggtttgctcttgtttggctggggcttgagaaagaagatgcggcggaatagagcgaaatgcagcctaatccccagaaaagcttcgcaagcgtggatgaagttggcaatgtggactatggaattggggtttaggtgatgcagactaataccatagaaatccagaattccttggaagaagtttgaggttggaagagaaaacccgccgtaaaagaaataggagaatacaaccacctcgtgtgtgtcgtgggttggaaacatttcgccgtatgctggacgccacccgatgatctccttggccggaagaacaccgtgcgccaccatctcctttaggttttcctccgttacgtcggagggcgtccactggctctcaaagctctctctcttccgccatggatgcgaattggatgatgtgatttggttagaaatatggctgggaatggatgggagattgatgcggtggttgtgtgggagattttcgtggagccttgaaggctggattggagcgaatctgtgaaccctagctccatcggtgtggttttgcactgtagcagagaatggggaaagtggcaagagtttcagcggggaagacgaactgacgcttaggttttagttttattagggtatcgggagtactaatgggcctgggcctaaatcagtacttcagcccaattttgctatcggcgtggtttagttgtgatccttagggacttaggcattttgcttcgacaacatttgctcacaacagtttaacccaatgctgttaaaatcctttttgacgcagttagataattccttggaattactacgatgcaaataaaaaggtgctcgacggaaaagtgttatactaattttgtaagtctttttaggctgcaaaggctgtctgggttttattgagatgactggtttttgtaagtcattctctcggcatgattatatgcttattttgatatagtgagagttatagcttaggcgatttagactcacctattgtcatgatttatatcacatttgatggatcttttttgagaagtttttactcggattcttatcatatgtgttgatttatggacttttagagtgtttttcactcgggactctttatatatccttttttggtgtctcaaagctaaagcagtcggctggaagttttattaaacatagcatatgcttagctgtgtgataccatggatgatatggttgtaaaaccattcggttggatttttgcaccttgactatatgtttagtttttaactaatcacatagtcgggggctacacctaattaggtgcatctagtcgatgcacccaatttttctattttcagcccttcacagtctttgattttgatactcgggagaccaaggcagaagaagttggagtactcggattatcgtttgggattacgagagaagactatctttgtcgactgtaaaggtctcaggggctactatgcagattatggataccccatacctacatggtatgtatatccgactgggtatggggtgccatgtatagatagaatatctttaaaaggactcgggttaaattctaaacttgaatgtcaaggaaatacccgggatcctaatcggttacaattgtattttatctataactacctattccgttagggatacggattgtattttgtaatacggaccccttcccctatataaggaggggtccgggtgcctcttggggcacgtttttcacccagatcatatgatcaataatacactcggcggatcaatccctggacaggagtagggtattacttcttgattaagaaggcctgaacctgtataaaattccttgtctctaaacccatccacttttccagcttgatagccacccccttttagtattgccgaaatcttgtttcgacagggacgctccaaatcttctcctgatggcggttgaggggtacttcggacaattccccttccacaaccgtcataaccacctctatataaggagctcactctcttcacttcaacacacacctcaagcaagagctctctcattcctctcaagtttagtttagtagtatctagctggtggaatagaattagaataggaatcaggagtccggaagtcttcggaagagttcgggtatggctctagtagctttcctttcctcttttgtaagctttgtacttttattagaatactcttctatatacatttctggtattgaaatactttccaagtatatgagtaccaactttacattataatcttgttatactgagtatacggctggcttatctgggagatgctttggtgcgggtatagtgtttgcttatgcaattactctatgtcatgacgatgatattagagtagtatctggtagtttagacgtggtgtctagattacgggatatcattagttggggttatatattgtggatgagaggtgggccgctgatggtgacagctcagtacgggtattcctccgcgcctatatataatcctaagttaatttcctggggagggtattcctccgtatttagccccggttggatggtcatgacgggctgtcgtaaggaacttggcagtcggggtggcttctcgaactaccaggagggcatcgaatagagggtattagctagtatatcagttaactagaatgtatgtatactatgtatttagaagtataggaatagatttactttctcttttctttccacctagcttagattattttttataaggatgagtaggtaatgcttgtgtgtcactctacccttggattatcataacccctgcttagaatatgattatcataagtaatatataaattattagttgagttctctctacaagatcttcccacgggataaaataaatacgatacccttggattactctcgggtgaaatgctacaatggtatatccgtgcgcttgtggatgaactctataaccataatataccagaagtatttctgcgccattgctgggaattatatttctagtaatgtcgttaagaaataccaacacctacatcgctaaataatacaactagttctccaggactcccatccttcggatggacaagttagaactagtgcaacctattaattaaaatcgatggaccgataccatcgcatagatcgattagcctaaacatgtataacatatgaaagatgtataaactactcaaagaacatattattgacaaagcaatatatgaaccatgaacactgatagctaaagaagttaatttcactactaagctcaaagtcttacaaagagggaaaagtaataaagacatacacaaatctccaagaagattaggaaaacaaagaacgactcttagcctaaactccactaatctagagagtggtacaaatgagaaataaacagattgattcttgagaatgtgttgattgtgagagcttctcctccttttatagctcccaatgatggttgagtatggtggttaacacccataaccgctataaggaaccaatggggagatgccttgtgggaggtgggggatgagagcgaccgagcctggttcaactgaaccggagccatcgcctctctgcaccgaccatctcccaaaggctgacatgtgggcccctaggacggtgcatggtggattggccacaaatatgtcagtttgcctggggtgtgtttctttgcatgccgactcattttctccttcattttgtagcaaatcaatgcatccatagtattttaaggacaagtgaaactacatgatttgaaactaatatgcgtgtaagaaatgtcacttctctttatttattgagataattgacaatcaaaatcagtacataacgaccatcaacaataccctgactagaagtttcggtaacccgctcaggttgctttaaagtgtcaagtagaagttctagtcacgctgaccgaaagttttcatatgcctagaacatatatacctcgatgttgaattgttacccctcccaccccccccccccaaaccttcctcctcccgatctccgcaagaacctcagatatcataaacattccttcagatatggtacattaccatgcttttagtcattatcttctagtaatatacatattttattagcagttagtgtatcgcacaagtatgttcttgacaatcctttatgtgttattttcctcaaaatatagggtagacactcctcatttgttttttttaaagaactatatatctctgaagtcattcaaatactttaatgcatatgatgaggacatcccagctgtgcacgctagctcaagtcccaaagatataaatcaaggtccacttacgcggagtcgtgcgaagaaactacaacagcaggtgaactcactccttgctacatttgatgcatctatagatgagaatattatactacctaaatattctactttggttgtgcttaggaatatgcaacaagaggaagctgaatgggacagtgaaaaaggaccagcaaaaacggactagttcagcttcaaaacggactagttcaagaaatcgtcattacttttgattctcaaaagctatgaaggtgaatgagcactttctggaaagtttattgagtctattttcaacccaaaaaaccgctcgtccattgaatttcccactaaagagttatggccagcttagtggacacttctccgaaggccaacagtctgccaagacattcaactttccatgcaaaactgcatcaatctacaatatttcgtagtgcattatgcacatggttgaaagcttattaagttagctgtccaacacaaccgaccccatgtcatttggacttcccaataaggagtaatgacctttttattgaaggctgctcaaaagccaaacaaatgcacgagtcttctcggaaattcatttgtggagaccttggggctatcttatgtccttcaaacttccaagacttttcatacctatctaggagggttgtttctagtataaatatcccctatgtgctatttagaaaataaacttttgatgatttgataacctgaatagtttttgcagccaagctgcttgagtgtcttacacccctttgttcttgcgagttctttttggacttgtgaggaagatctatctgaggtaccctagttcgtgctctacggcttccagttcggctgcaccgtattgtgtggattagtcccagattgtgattctgcggttgttcggagatcgagtcgaagtcctcacggtttcggtgtctctctccccgttgcttggtcgcatccaaccttagcaggtataaagctagttacccgttgtttctacaacaagttatctttggttttcatcctactatcgagaagatcgggccaccctttgcgagtgtgttcgcatcagcatacattatgagagtcttatcatatgttttgtggttttgaaaataacttattgtaagttcaatttgtgtttaatctcatgagaagtgaaaacatccgcaaaggtattatgttctttcgattagtaaattatttactctcacacggtatattttatcgagataccttatgtaatatagcttaaattccttagattgagtttaatgccaaaatagtgctcacaaatttgcgttccaccacatgtgatgaggaaaacatcctttggatacgcatgagggaggattgggaagcacttggtgagatgctaggacatggaggcccaatttatatcaagtttgagtctacctaaggggtggttccacatttgattgtggggtttgccttatctctaatgggccgatgacacaatattgttgacaaaagctactgaggagaatattctggctttgaaattcctactcttttgttttgaagaaatgtctggtatgaaaataaataaccataaaagtgaggtgtatgtcattgggtgagtaaagaagaggaattccgtgagccgttcgtgggaccaatagaaaatatatctgcctacaggcttgcactcaagtctggtagtggaagagagatttgctgatatgcttaactgtaaagttggtgcctagccgattaactactttattatggattcgtatgggggtggaaaagattggtaggagggagctcttgctagtaatgcagaaagttgaaaagaggcatatgtgtgtagggaaatctttactatgggtgtagagaaatcataattaattcttgcctttctagtatcaccttgtacactatgggtttttataaactttgtgaggagttctataagaagatggatgaagtgagggggaggttttactggcagggtgtggggaaaaagaggaaataccaaatgatcaattggcaagctctatgtagacctatggagtatggaggtgtggtctttttaaataccaaagatatgaacacgtgtctcttgagtaaatgggttatgaaaattaagggaaattaagatgacatgagtgttgtgctcttcagaaaaaagtacttgccaaataaggttttccaatttttttcgttagggtggttctcggttctggagaggttagaaagattataaggggattcttgggagactaactgtgaaaaaaggtgggaagaggggattgaacttacttctagttagatgtttggattgggaatgtttcattgaaaaaatatgtaccccagcatgtacaaaatttgaaggcagcaatatgcaacttcaaaagaagtcactaatgaggtttcttgggatatatcctctacaagaaagctggacctcttggacaagtagagttttggggagattatggccttactaagtgggcttactctaagtgaggaaccagataaaacattttggcctcacacaaaaaatggtattttcacaaccaaatctatgcacaatctgatcaagcaatggggaggggggagggtgttttgaaaacaggctagggtcttggcagagtggatatttttcctatgggggtagggaaattagaattacttgttgcatttccagtattcccttattcactatgggttttataaacttcttgaggagttccataagaagatggttggagtgagggggaggttttactggcagggtgtggagaaaaagaggaaataccacatggtcaagtggcaagctctgtgtagacctatggagtatggagatatggggttttaaaatactaaagtttatgaacttgtgtctcttgtgtaaatgggttatgaaaattgagggtaatttagatgacatgagtgctgtgctgctgagctaaattttttatttatagaattattaatcccaaaattaaacaagtaataaatagaaggcatgaattagaaaattagtaaggacgccgttggaaagagcatccactttcggacgctatttttatcaatgtctagctcgggacgctactgacaacggcgtccgccttctggttcaagtcatcctgattcgaccgaaccactcgtctatctcaccccctcggttcatacacgccttccgccttcagtgatttcccactgcctgtcaccgcccatcgtgcgaaattgactcggcgtcgctgcccctccacatctccccatttttgttcctcacatggaaatatggaatccaggtgcttctgctgcactcggcgattcctcgttgattgcttgcataggaatttacgcgatatctacatctcatcatccccgcactgcaaatcatggccaccgcgcgacctccctggccagcaccgtgctcttcacttgaattgttcttgtttcgtggaaattactgcttcataagtatctgaactgtgtagggcatcaattatgtggttatattttctgaagaagataattcatgcaggagcaggtgaggtaaccggaaatgagtcttcacagtgcaatatgcaggtcacttgacacaaggaacatcaatgtcaaaggaacaacaatggtgttcagtgcataagactagtgctcacatattcgagtgcaacgtgttccaaaaagccaaggctaggaaaatagcctgagacaagggtaacagcgacccttcatccgacgacgaaccagattttcctaacttcgaccaacacgtggcacacatcttcggtggttcaacatcctattcctttaagcgagaatgcaagaaggtagaacgtgaagtttgctccacatcccgggtatcaatgtccaaaatgaagtggtcaggtcagaagatcgagttctctgataacaacccctgatagatatccgatagtagtcgagcctactatttggaatgtcaaagttgcacgtgttctcatcaacgatggcagcacaatcaacctcctctttgcagatactcttgacgcaatagggatccctagaagtgagctcatttcttcaaagcagctcttccatggcgttacacatagtcatcatcaagattgttatggaagataatgttgcttgtgactttcggcaaggctgataacttccggacaaagcagatcacctttgatgtagcagagtttcacactgcgtacaatgctatcatcaaaagagcggcacttgcaaaattcatggggcttcgcactgcgcatactagcggattaaggttccaggacctaaaggaataatcacaataccgagaaacgaaaagatggttgtgcagtgtgacaaaaggaatctcgacatgattgagcaaactcccaccactcccgccgcaaccgagccaccccaaaaagtgagtaaacccaactcggtaggtgaactagggtttataggatttcaattttggggatttttgtttcgtttagcatgaaaaaaaatacagttaggtggcaataacatgccccgtgccaatattttgttttcgcatgtggttatgctgcccacctgaaaaatccctatttctacatacagctaggggttggcagatgctacacccatttacaaaaatatattttagctgtttggaaatattgtttctaactttctatagtagtgcatatacggatcaacaaggtataggctatatagtatcctcactatatacatgcccttatatggaggacccacattcttacattaacatctcaggtatggctccattcactaatgaacaaccattaatatctatcttaaaacggaataacattacacatgaaataaggtgcaaggaccgatgaatatgcacgcccgcgtagctacgaacaacagccatcctatattagtaggaaggtcttgctcttgttattaactataagtgctcggttgtgttgggatacgcgtaggctacgatagcataaatcaaaattttctaccgcgtaaaccatgaaccatgcaagtattggaacgcgctgcgcggtggaagaaggcactaagaaggcgaaggaaccctcgtaatgtagcgcgtgtcgacgtagaggaagtagtcgatcgcaccggctcgaccttctcctcctcttgcgttctcctcaccgtactcccatgccgatcagcaccataaaccagcggcgcctctaccggtgtccacacatacagggacggaacgccacgtgcagatgtgcttgcacccacgagcggctagggtttgctcggggatggcagtgacggctagggtttcacgtggtgtgttaattccgccggtcacttcccctcatgaatatataggatccgcgactgggccttcgaggcccataggagtcctactcgaatccctatttgattgagtgcatattggatctccatccaatccctttattctggccctttaagcgtgcgaccctgcaggttcgtatacactaggctgtaactcgaaaattccttttcggtccacgtgtcaacagcggcccctagcagaacgtattgacccaccgggcatacataaagatcatatcggttgaacctctagtgtaaacttgtatgaacccttttgcctcacaatatcgattaagctcaaggctagatatgtgccatcctctaatagctcaatcattcactcgaacttatgatatattatataatttgtgattgactcctcaatcacctttggcatggccatgcacttccataatttataacatcgaggggcccagatatatctcttcataggagaggcaaatcccatattgattattcatatcccactacatgttttatagcatacccggaaactacttttataactacccaattacggagtagcgtttagcagtccctaagtatgctactacacatgttgagaaccatgataatctcaggtctaaggattcaatactaacactaacactaaataagatcactgatgacacaacacatatgactcttgcagtgtctcatgttgggtctatccaacaacatgttccccatcatgtgtccacattattaatttggtatctctataccacgatttatgagacataattatcaattaatacatgtgctgatcatataaacatgtttgttccacatataatatttgatcagggatcctttagaaatagcaatatacaatataaagagtctcataaaagaatcacatattcattaacaaataataagttatctatttcaaggaacaatatcggataaatatgtaaacatagtatgtaatacaatcatctctatgattcatatcactgataggtcgctcctaacttgccaccaccaacagcatggatgtatcgctattaatatagacatacacgtatatatttgaccagcaacagcattggtgtgccgcagccaacaagcaaggcaacgtgggccaaggacccaaggccagacgcacgctcggcgcagcccccgaagcgaagcgaagcgcggagatagcatggcaaagatccctggcttgatagagaaagaaagctgccagcgcatctggaaacagtaaaccccgttcaggtctcaactcaaattgcagcgcaacagattattgtgaggaccacgcctcctcacaagtcatacacacacagcgctgccagcaggcccaacctagacccaacgacgcaccgggctcgtttgcgcgtacggacggacagccagcggagcgcagagcgtagcgatgactttttcctcttgggtcgaggctccgcagcggcgccctcggggattggaataagttcaccggaggtccctcaacttaacaacgagattttttgaggtccctcaatcacaaaacgagaaatatttacccctaaactcattcaaaccgttcaccggaggtcccttggcagtatttttgcctggttttgctgacgtggtatcctagtcagtaaaaacaaattaaaaaatttcgtggggcccacatgtcagctgcacatcttttttcttctcttttcttctccttcccttctcttttatctcctctctcttctcttcttcaggccggtggcgggcgcagcagtgatgggagagcgtggatgcgggtggcgggcgagcgagacaatagtgcggcggcgagctgcggcggagcggacggcgggcgagcgcggatgcaggcggcgggcatagcggcggcgggctgcgggcggagcggacggcgggcgagaccgggagaggaaggaggcggtggcaggcggtcggcggcgtcgtcgtcgtccccgagcgggtgtggcggcgctgggagctcgtaatcgtcgttgtcaggcagggcggccttggcgctcgtctctccgcccgctccccctcctcgtcctgggcacggcgctgtgcgcactcgcgtcgttcccctctgtcgcatccgcgtcctctccctccccttccccatctttcccgccgtcaaagcagcacgagaggcacccaaggcgatgacctcgcctccctccgagcggcggcggtgaccttgtctcactccgcgctcgcccgtcgctgcctttctactccgccgtcagcctctcgcccgccaacgccgatgctccgcaaccacgctcgcctgccaccgcagacgtcgccgctccgcctgcctccagtcgcacactgttgccgctccccatctgcgtcgtcgcgcaccccgcgtcctccgcccctctgctccgcccaagcccaaagccgccgcttgcccgccgcttgccaccgccacagccacgctcgcccactgacgccgccctccgcctgctgcagccgcgcaccgtcacccgctgcctctcgcactctgcgaccgcgcgtgtccgccgctttccatcgcctgcagccgccgacaccgcccctccgcctgctccggccgcacgccgccgctcgccctctacgatcgccgacgccgcccctctgcctcactgctctcactgctcgtcatatctgctatcactcatgccgaaagagaagaagaaaaaaaatgaaaagagagaagattgctgactaagatggttgatcctatatttttttctcacgtacatgtgggccccacgaaattttttattatttttgctgactaggatgccacgtccccaaaatcaggcaaaaatactgccaagggacctccggtgaatggtttgaatgagtttaggagcgaacatttctggttttatggttgagggatctcagaaaatcttgctgttaagttgagggacctctggtgaacttattcctctgggattttctgcgtgcagatgcgtgggcagccgctttttcggccggtgccgcgctggtgccccgggcgcacggatgggccaggccaccccaacacgccagcctcccgggccgttgagtcgcgccgagatgaggccgcggcttcaagaggggcccgtgcgcgggctgtggttccattgatcgcgctaagcttctcggtgggtgcctgcggaaaaaactgaaattcaatggcaccccatgccatatagaatgcatggcatccattacaagattttgacacctgacaactaaacctctacgtttccagttttactagcgaagaaattgctaggctcgccgaggccggcgacagcgacgcacacagaaatgaggcggcagcgggcaagcggccggcggcggcgacgcacgcatgaaatttacgcggccaccaccgcatcagatcgcggggcgtgttaattcaaatgacgttagtcctgaagattgcgcgaatgaacaaagtgcctgagtgtgttatgatttgagagagttaatatgcatgctgtggcgatgccataattaatttcagcctggtacttcactaggctagctgttcattacttcatcggttaaattaaaacctgccctgaattggcgagctgagagcgattcagggcggcgtgttcgcacgcggaactatccacgtcgcccccgcgccctgggaggcagcctccctccttgtgcccgctcgccgtccgatcggcttcattgaacggtaggatgatgagggtggagattttgcaaaaagaccctttacattgttagtaatttgttgtaggcccttcacaagaaggaaaactttatatgaagaagagaaaaatccaaaaatagaactgcgctcgaaaacatcgaacagaaaggggttcttttgaaaaaatgagcatacccaattggccaatccccctcccacgaaaccctagccagccactgttcccatgccatcctcccttgctctccctgccgctgccttttccccttcctcccctgctatggtggctcgtggcttgagcctcgccgcgccgcaactgcccgcccaccgatgcctctcgctggatctggcgagcttgtcaggagaagggagaaggagcttgggggaacggcggcggcggcagccgaaagcaggcgcggtggcatgagctagggctggaaatcgatgggacgccactaatctggtcccagcgcaacaccccattcacgagattagagcttgaggttgacggcgaggtggttgatcccggctcaggaaattgggcggtccggacggatgtgcagaggtaattctccaaagtaaacctcccctcatgtcccagccacttgattgttcttgctgccatcctcaagagcaatggatctagcgagtggatctgcctggaacttgttcgttcttgagtgcattctgggagcactgcatctagcaagtggatctttgcttgtatccatttttgctttgacgtcactctgctggtatttggtgaaaaaaaaagacaggtatactttcttccctttcccccacctctaatggtttgtgcctgcaatggagcaatcgatatggtcaaaaatgttttacccactgcaatgatccttcagctgataacactcggtttcagcatggtcaggatggatcgatttgttgcagaacaacagatccatcaccaagcagtccattgccatctccaccatgggttccttcattcttagtagtccgttgccatcgtcatcttgggctccttaattcttagtgcatgtagattgcagacccgttggtgcaagacatgctctgcaatgcagaaaacttcgcacctctggctcaagttagtatgggaaaaggtggtggctgctggactatcaattgtctggcttactatatttcttgcaattctgtatacacacccagtgataactttaggttgcacgagttgaaattatctagcaatcaaacttagtggctttttacgatttactgtcaagtgatagagactcccattacctgaccttgtactgaatatatatgtctctttcagagctgcaaatagggatagcatttttttactagatgttaatcatagatttgcatggtatgcaaattgcgcttaacatcttctcttgaaactaaattgtagctgtggcttttcttccttgccattcgtgttatggattgcacgaatgagtgctgtatatattttttttcgtgccttgccattcatattaaggattgcatgaatgactgcacagctttttattctttctgttgttgatgcactgaccttagtttccttttggcaatgattggctcattatcttcaaagggtttaggtggtatgcgctgctgggaaaaagatgaaatttgtcactagcaaatacttaaggtaaactgtgatgaagtttctagagaatgcaaatttgggaggttgtgttcggggatacaagttgtgattttttttttgaactaccgatccaggcaaaactaatatgatttgccaccctatatgaacaggtataagttgtggtgcagtccgatttgtagctaatctggggatgagcgacatttttctgaatcagattcattcattgcaatataaagctttaaagggcaatataagcaatttcgttctagctgatgattagtggatagtagcaatgtagtttaattttagaaagaaaaggagtgatgcatagggaaggaaaaccttttgttcaaaacaaaattatatcattagatttctcaagaccttgctgttttgtgttttgctattcattgagcattttacctaaggcctagttgaactaaattttgcttgaactcttgaacccagcctcatcccgtcaggacctcatcttcgatgcaattcctatgcatccaacagcaagaaagtggcgtcgattaatccctaagagcgagggatcggagtggattgagaaaaaataattcaacaccacaataaaaatgaaataaattatctctaaatctgctgtcaaatgacaattgcgtctcatcaaagaacatgaaacttggttggatgttttgacttagtaaaatttttaggatccctcattacatggatctagtataagctgttaccctctagggtttattgtttatagggtatattatatgaatgcctttatgatggtgacatttacaggggtaaccaatgtctattaagttgtgggcctcctaacagccttctcgggttgggcccgtgcgaagttgcgtccctgcttcgccctaggctccgccttcgtgcttcgccatgggcctcgccttcatccagacttggcttctggttgttttacagctcattggtggttttggcaggttcggatgaaggccctcatgatatgtctccaccaaaatccttcatcgatcccttgtaggagggattaatcgaataatgaccgtacaagtcgctccctagaccctatgccactgactcatccatgtgcgcattgtagacgcgagttggtagaaggctaggagcacacgcggcagaaaatttttttttatggcacttggcacttgctgagtgccatatagaacgcatggcaccccttgccatattttgcatgattctggaagcaactagaccttctgaaaccatgcctttccgtttttcttaaagaaaatcaacttatgaatggcaatcgctaaactagcttaggccggcggtggagtcaggtggcggcgatgcacgcttttttttttccgccgcgtgccccttcccttatgctaagggcagatgctattttcaaccatatattattttttttggcaaagttgccaaaaaaaatgtctacgtttagttgtggccgaatttggccaatacataagaaatcctgccaacattttggcaatattgatatcttgccaaaattttggcattgccaaaacttggttaggtttattttggctacaatctgaacaggccttaagaattatttttctacgatgccagcaaaattacacactactccttccgtcccataaaaaaccaatatattactggacgcacagttattaaaaccggaccggaccggcgatccgaaccagggcctcggtcggtccgcggtccagccaaaagacaggccatgtaatcaaaccggagttgaaccgccggtattaggtatgaactggagaaaactggcctcggctggtccgcggtctagccaaaagaccggccatgtaatcaaatcagaggaaaaccggttgaactaccggttttaggtatgaactggagaaaaactgtacattagatcggggaataagctggtaacagggcagtgcagtccagccaaaagaccggccatgtaattaaaccggaggaaaaccgattgaaccgccggttttaggtatgaactggagaaaaaatgtacattaaaactatacattagatcggggaataaggtggtaacagggcagtgcggtccagccaaaagaccggccatgtaattaaaccggaggaaaaccgattgaaccgccggttttaggtatgaactggagaaaaaatgtacattaaattggggaataagccggtaacagggcagtgggaacgtgggatgggtgagaagagaaaaataggaggaaaagggccgcgcataggattcaaattgcctacctgtggtcacaagaagtaatctcccaccactgtgctatggactcgttgatgtttttgattaatatgtgaagatatttgactcgtgttgagccggcggtccaaccggttgagccattcaaaccgtgaaccgagggcttcaccggttccacgtccggtccggtcctaataactttgactggacgtgacatatcctagtactatgaatctggatatacctctgtccagattcattgtactagaatatatcacgtctagtcttaggttcgtttttttggacggagggagttgagaagatcaacccccccaccccaccccaccccaaacacacacactgtgttgcgctgctgccactctgcacctcgcagcgctgaacgggatgaatcggagaggggggaacgaattggcgaccagagagactacctagaccagacaccccgcgaccatagaccaatcagactaggttgtctattctccttttctagacaacataaaaacagagcaaagccccaattcgaaaacctgttgtgcagtagtagagcagcaggcagacgcgaccacgcaaggtgtgagagaaccgggtgttcgaggccgcctgcctccgttgaccggtccacggtgcccctagcagacatgccacggccatgcaacgccgtccaacgatagcgcgccgtgagctacggtggtctaagggtgtggttggttaaaaagatatccctagatatggttagtttttgggtttgtttggttggtgggtaagggacgataggatggaatattccatgattatgactatgttaatgataataacggaaacggatcgtctactgtacagttaatactgcacaggtgctgtagcgattaaatcaagccatcagattacattagatggctctgattttgctcaatctgcccaccacttacttgacagttacatggctaaggccatgaaagcttcagactctgtttatacatatgtgtgtgctgttcatctaacaatatgcctcccatttcacatcttctacaaatatcataagcagagcatcgcctcactgtgaagtctacacttattccaaagtgtaacactaaaaaagttgtgtaacactaaaaaagttgcatcgttcatttacaccctctacaaaatagtgctctgatgaaaaggtttcaggaagattaaacataatactctgatggaaacatgtacaaaggtaactgcatgtgtgccaatagttcagtactaaacgctgacagaaactgacagaagaatgcatagcataaattttctgtggcattgaaaaaaaatgaatggatgttctcaaaagtaaatgttcaatggcttgatttgttattgtcaatttgatacccaggtatctagctatctcccatcaaaatttgcactgaacccaaaattccaggtagtatcaaatatgttctgctccatgccatcaccctatacaatgaattagagtaattagaaaaataatattgatgctgctagacagtatgcactaaatatataagttttagtatatataagtggaataccctcagtagttctgcatagctattgatccatccatattcttcagatcccttctcattcgttccattagtcttctccaccagaatttggttctgtgctatggaacaatccttcacttgctgctaagcaaaaccatccagataaaatattactctatatataatcagtacatatatagtctaattgaatagtacatatatagtctaattgaatagttcgtaagtaacataccgagatattttgtttgtcaggtacaacttgtaccttctttttggtgggatgctgcttatcaagccaatttttctttctccttgtgctacacttttgagtttcttttttcttcagacgtgcagtgtgcaaagagccgtttgcttcttcagatgcaacttcacctagttgactattaggtgttttttcatcaacttctttcctcaggctctctagaacactgtccactagtgtgctgcactctttagattcagcagctcgaatagctataccaagaaatttgtgaataagaaacttcaagaggcacctatcctccaatctgggatcttctacgacaatcttgccataacagtcctcaatagcaccaactcgtgcttctcgagtccatcgcttcaaaatatatctctttggcaaagacttaatattcatcacatcaaggactttcaaagcatgactgcacaatattccagtcctttcaaattgtccacaggtgcacaatgcctattgctctgcataattgcctacaactttgcactcctcttcaaatgttgacccttcaccaggagcctcaattgcaacaatgaattcattatgttctgatgacttgatgtatgtagccatggatctttcatattcattttgaaaatattcaaatatacaaggtgtgtaaatcttacttgcttgcaccaatataggaactctcattttaattctaggcaatttttttcttgcttcatattctgcatctaattcgttgtctcgttttcctttgataactctttcaagattattgaaaaaccgaataatgtcaagatcagacttgagatggtttttcaagtcattatttaagctcactcaactgtgtgcttctcatccctaatgtgtaaacattcctcatgtagcattccgcccatttctcttttaccttatatatactgtttagccaagtctgcttatgcaccttgcttctgatggtactgaaatcttcctgaaaagttgcttcatcttcatattcatacatacaagcactgaaatcagacaaaatgtttgtgtcttctttcttggtacgaggtaagtgtttgatagcattttgcattatatgaaaagtgcacaatccatgcttctgtaaataccacctcaattgcctttcccattgcaatatcttgatctgtgtagattgttgtaggctgtttttgattatgtacagctaaaaaggtctcaaacaaccatttgaaagaatcaaatgtttcatcatacaaaagagcggctccaaaaatgactctatctaaaatggttgaatccaacaaagacaccaaagggcctgtattctttgtttgtcccaaatgttgtgtcaaaagtaacaacatctccaaactgagcatagtcgattatcatcttagcatcagcccaaaaaatatttgttatttgttcttcacaatccaactgaagggcataatgaaatgaagtgttctctgcaactttgtcctgaaagtacttcaacatacttccggcttcgccatacatcaactccctttgacgcttggttcttaaatggttcttgagatcacgacgtgtataaccaaggtttactgaaccaccaacttgccgactagcaagctcatgtgcagcttttggtccaatgcccgaatcatccattgtttcaatttcaaatgcttgcaatgatgatatctttctctgtgatggcatcaaatggcatgttgaaggcaattgaagttcgtggttatgttcgagaactaaatcatatactgaataatcgtccacttctctatctactgtgattccgatccgagctttgcaacctgttcttgttttagcacgaggacgcttggtgttgtgatctcttttgtctattgcccggtatccctcattggaacaaacatatcttgcagaagtaattactccatcaactttactcttattttcataatttatcctaacatcaaaaccagtacgacctccataataagtccaaaattcccatgcctcttttgtagatttaaatttcatgccaaattgaggaatccaactaggaatcatatttgtgctgtaaaaagaaacagggatcaactcttttttttttacaacaaagaaatacagtgttaaatatggattgctatgtggtcatgattaagatcctattcagtaatgagatcaacaacatagtcagagaaaagaaaaatgtagatgataaaactatgttgacctgaatgaaattgatctcacctatttgaattatgatggttggagtttgagtcgttcgccataaggcctcagatctgtaggtatactctgtttagcgctacacgagtgtagagtgtatccactccaatcataagaatcacacaacaatgcttttggttttttttttgtgaggacatgatcacaaaaagagtacaagacatggcatacatacctgtttgttggagactgatggcttactttatctgatcatcaaagtttctggacagaacaaggcaaagtgaaacctttgtatctccttttggcaccaagtcccaaggaggaagaaagcaaagggagaacctgtattattttggcgccaagtactctagaggattcgtgattttccctccatcaaggtgatcttgacttttcctccttaaaatcagtttgttagtttccaaattatcaaaaatattttcggtgtttaaggacggaatcagagccgcttaatctaatcagatggcttgatttgatcgctacagcacctgtgcagtattagctctacaatagaggatccgtttccgataataacatattttgttattgttttcattatattccttctatccataaaaaaattggatgataataatatccaccgactcataaaaaacggatcactgtatcctatcaaaacttgactacgaatcaaacgcatcctaagcgagcgatcaggccctgctacggacccttgagagagaaattatggaagtcgaggcgtccgtgctcgcttgtgttgtgccgcgccactgagatcgcacgggcgtcacaggccatgaggggtcggggggcgcagttcatctacagaggcaaggcgatgggttcatgtacacttacgtcgtcaacattgcctgcgacgactgttcgtaccatctactaccatgtaccaaaacgacagtccacactgcacgtctgcattgtggcttcgttcagaggacggaaaatacagtaaaaacatgcctgctcgactctcgactccctgacagcacgatagttgaaaggattgctgatgcagtgatttctgctgcttctagtgcaggcatgcagcagctgctcatgataaggaaaaatcagacacagaaataacattgctgcattcatactgcatgacctcatcactctacctcggtgatattattaattaagaatagagattttgatggtactattttacaatatttaacgactttggtcattttttttccaatatgcatataaacacgcttgtgacttaattttaccccattatatattttttctcaaatgtatagcaatttaataacactaatacgataacctaacaccctccgccacaattcctcctgtcctcacccctacaggtccgttttctcgcattaacgcagcatattctttcagaattagctgtaattggtaatcagtgactttttaatttcagatagttcaaatgccgactatgcattagctagaagtgttagaatctatgatagaggaggatgcgctaggtgttgctaggcaaactagaacacactgtcatatgcttgcctagatgggcccctctctagtgagcattcgatggattttacatataaattaaaagttctaatctaatgattggaagttctacgagacgactagacgtcggacatccgataaaaatcaaaatattgaacacccctcttctgctagaggcaatcatagagaagattgtattacacactatgtttacatatttattcgactttgttccttgaaatagataaactcattattggttaattaatatatgattctttcataactctttatgttatgtgttgctatttctaaaggattcctgatcaaatatcatatgtggaacaaatatgtttagatgatcagcacatgtattaattgatgatcatgtgtcatggatcatcgtatagagataccaaattaataatgtggacacatgttagtgaacatgttgttggatagacccaacatgagacactgcaagagccatatgtgttgtgtcatcagtgatctcatttagtgttggtgttgaatccttatacttgagattattatggttcccaacatgtgtagtagcttacttagggactgctaaatgctactctgtaattgggtagttataaaagtagttttcgggtatgctatgaaacatgtagtgggatatgaataatcgagatgggatttgtccctcctatggagagatatctttgggcccctcgatgttgtagattatggaaatgcatggccatgccaaaggtgattgaggagtcaatcacaagttatataatctatcaacaggtttgagtgaatgattaagctattagaggatggcacatatctagcattgagcttaatcgatatcgtgaggcaaaggggttcatacatgtatacactagaggttcagccgatatgatcttttcgtatgcccaatgggtcaatacgttctgctaggggccgctgttgacgcgtgaactgaaaaggagttttcgggttacagccgagtatacataaacctacagggtcgcacgcttaatgggccggaagaaggggattggatggagatccaatatgagcttaattcgcatagggatccgaatagaagtcctatgggccttggaggcccgagtgatggatcctatatattcgtgaggggtgtgaccagcggaggcattgcatcacgtgagaaactctagccgtcacttccctccccgagcaaaaccctagccgcgcgcaggtgctagcacatctgtgtgtggcgttctgtctctgtatgtgtggataccagtagaggcaccgctggtttacggtgctgatcggcgtgggagtacggcgagaagaacgcacgaggaggagaaggtcgagccggtgcgattgactacttcctctacatcgacgcgcgctacttcgcgagagttccttctacttctcagcgtcttcttccgctgcgcagcgcatcgagtggtaacgatttatgatctaatacttgcatggttcctggtttacgcaatagaaaattttgatttatgctatcgtagcctacgcgtatcccaacagtggtatcagagccgccttgtatagtttatgatctagatcattgcatataattgatatgcaggtgtagtagatgagatctattatgttgtatatgagttcttaggtgatcggaacatgagatgagctaatagccgcatgggttgatgagatcaatcggtatgtgtgttggtgacttcactggaatgtctagtactcaccaaggccgagcgcgattgtgttcatcggatagtccgatgtccactggaaccacacgccaatgagaaaaacgagccaatgagattgactcggtttcggcataatttgattacgccgttaaggttttcacatagcgggaccgccgtgtgcattgccccttagatttcgcttggggctttatatctatcttactttattcctattatatatttgatatgacatggtaggatagattccctcagaaaaattatgtttaatttatgctcttccaataattgcacctattatggtttgccatagcaaagtgtcactttttatcatgataaaataggatagatgtcagacatctatatgcggagattattggtttacttgacaaagttatcaaaacagttttggaccttggggcataggttgggttggacatggagatatcaccccaacagcacaagagtcacatatgatgtgattagcaaggtgttggttacctattttgatagttgtctagttgtgatgccaaagctcattagacactaataaaatgaggatcttgactcactatgttactagagggaattttgtttcacaatacatagtggaagtatcttttgttaaattgtttaatgaaaggttaaatgtaaacatggtgctgattttgcatacatatatttctattgtagatcatggcagctcctgcaccatccagttttaacttgcggtctattcttgagaaagagaagttgactggaacaaacttcatggattggtatcgcaacctgagaattgttcagacaagagcacaaagagtttgtgcttacacagccttttccaactgacttgcccaataatgctcctgctgctcaacatagggagcatgaaaagcgatgcaatgattatcttgatataagctgtctcatgcttgctactatgactcctgagcttcaaaggcaatatgaggcattggatgctcatacgataatcacgggattacgtaacatgtttgaggagcatgcaagagctgagaggtttaatacctcaaagtccttgtttgcgtgcaggcttacagaaggtaatccagtgagcccatatgtgatcaaaatgattggttacaccgagagtctagataagcttggttttccccttagccgagagttggctactgatttgattctccagttgctccctcccagctttgagccattcataatgaatttcaacatgaacaacctgaacaggaccttggcagaattgcatgggatgctaaagactgctgaggaaagcattaagaaaaactccaaccatgtgatggttatacataacgcaagcccaacaacaagaaaagtggtcaaaagataaagctaaactctgatgagatcacgagtactagcaactctaagaccaaggttcaaaagacagggcccactaaggatgcagagtgcttcttttgcaaggagacaggtcattggaagagaaactgtaagaaatacctagagcagctcaagcagaagcagcaggatggaaagagttccatctcaggtattaatgttatagaaattaatcttgctactttctctactgattcttaggtatttgatacctggtcagttgctcacatatgcaaatcattgcaggggctaaaaagaagtaggaacttagcaagaggcgaagtggacattcgcgtgggcaatggagcaagagttgctgctgttgcggtcggctctatgctattatctttaccgtcaggattagttttggagttaaataattgttattgcattccagctttgtgcaagaacgttatctctgcttcttgtttgcaagcagagggttatggttttagatctgtggacaatggttgtttagtctattataatgacattttctattcccatgcacccattatgaatggcttatacattgtgaatcttgatggatgttcagtctataacattaatgcaaaaaggcaacgtcctaatgatttgaatcccacttttatttggcattgtcgcttgggtcatataaatgagaaacacatagagaagcttcatagagatggacttctacactggtttgattttgaatcatttgacatgcgaatcttgtttacttagcaaaatgacaaaggcacctttcacgggtcaaagtgaaagggcaagtgaactattaggactagtacatactgatgtatgtggaccaatgagctcaactgctagaggtggttttgggtactttattacctttaccgatgactttagtagatatggttatgtctacttaatgaggcataagtctgagtcctttgaaaagttcaaggaatttcagaatgaggtacaaaatcatttgggcaagacaatcaagtatatatgatctgatcgtggtggagagtacttgagccttgaatttggtaatcatgtaaaggagtgtggaattgttccacaactcactccgccaggaacgcctcagtggaatggggtgtctgaacggaggaatcgtacattgttggacatggtgcgatcaatgatgagccaaactgatctgccgctaagcttttggggttacgctctagagacagctgcgttcacactaaacagggttccatcaaaatcagtggataagacaccatatgagatatggacagacaagcgtcccagtttgtctttcctaaagatttggggctgtgaggtctatgtaaaacgtttgcaatcgaacaaactcacacctaaatcagataaatgcttctttgtggggtatcccaaggaaacggaaggatattatttttataattgggaagagggcaaagtgtttgtcgcctgacacggtgttttcttggaaaaagagtttatttcaagaaaggttagtgggagcatggtttgacttgaagaaattcaggaaacaccggaaaacgcttcaacgtccacacaaccacaacaagctgagcaagatgttgttcaacaggttgaacaagttgttgttgaaccagttgtggaagcaccggcttcacgaaggtccgaaaggatacgacgtacacctacgaggtatgcggtgttaactacaggacaacgtgatatactgttgttagacaacgatgaacctactacctatgaggaagcaatggtgggaccagactctgagaaatggcttggagccatgaaatccgaaatagaatccatgcatgtcaatcaagtttggaacttagttgatcaacctgatggtgtaaaagccattgagtgcaaatgggtctttaagaagaagacagatgtagatggaaatgtgtcgggtcccaaaactaatgatttggtaatcgacatgtttagactgtatcaagccctggattagtaaattgatacaggttcaacactctggatcttcattgcatacgtttgaataaggctccaaaggagatattattacaaaacatatgggtatttacaaacttgtggctaactaatacagcagaagctatagaatgacttagctctaatgtttggctatagacttaaaccatctatctaatctagacttgagaattagattgaaatgaaactaacttatgtgattgaactcccaatttcgataagaactccaaaatgactctgaaaaagaggggttgaagcaagggtgagtacaacatactcagcaagctattatattcaataatgaatgcatgaaatggtaatatctgagtagagctaggtttacttgcagaaagcaaataatataaaaaggaagaaagcctagaatgttttaaatgcaacagtatttaataaagtttagaattaagtttctaaccaaataccatatgagtcccaatgctcaaatccgtgagcacggctattcgaatagattcatttatactctactgcagtaaatgtacgctttacccgcaatccatgacgtgccaaacacattagccttgtcatggcaaagcttttcggttactaacatcagtggtaactgttccatgaactctagtccccatacgctctgaacgtaacgttatcaacagcgagaggagttctggcgttcccgaggtctttagagagaactgattgtatgacaccatgtcatcgcaatcagggttcacaaacaagtcgacatcaataaatctcatatatttacctacgcctcggtaaatatcacaatcgccctgctcggtgtaaatttgcctcctgcgcgaggacttaaaatagaaccaatgtacagatgtaccacctttgctagataacttaatcagctaggtctatgcccatacgagaattgcggtcgtactcgtatgttcttcacatgtacttggcaattttatgtcggttgaaacagtactagccacccataaatcaaccatttctaccgtactgttccaatctaagtttattatattttatgtaatctaactaggcatggctaagcaaaatctagcatatatctggtttgctatatattcaggttatgcatttagaatcatgtatggctaatgcacaagatactggagatatagaatataggattattatgctcaaggagaggaataataacttgccttgctccaacgcaaataaatccgagatacgcaacctgattgtccgatccttgaaataccaccggttgccatccaaaatataatagactctactacagaagaggaagaaccaaattcaataaaagccataaaatagcgagaaagagataaacagttgggagggttaggatttagggtatagcctatctcttttatagggtatatggattactgagctgatattttatgtgtcggttctaaagagttggcagctggggtggagaaggaattaagcggctaagatcacctatattttatgtgcagactttgattggttggtggatagggagtatagtggataattgaattggttgagcagatatgtgactggtattggctgatagtaggtttggataagattatacctagggtttggttatatttaggccgattgaggagtagggcaatatatcggccaggctctatattttatgtataggttgtggtagacagaaagtaggtggatgagagtatggtggataggtgatattgtagagggtatggaatttggatgacaactgggatttgactagcagggtatcagctagggtttggttgtttgctagtcgttgctagagttggcagcataacgactagattcagtgtcttctcttgccagtgtcagcagacagcatatcggccagagggaataggaggtgggtgtaggtttagtagggcggaagtgttactctgacaaccgtgggtggcggcggaacggctaggatcacacagagactgagagctaactgtgcggcgtgctgtggaggtcgatagaatagtgaaactccgaccgctatacgcatcaaggcgtagggtgccaggagcagcacttcgaccttgggtttggtttatgccgggctttacaactaacggttcgatgttggggatagaaaaccgtgaacgtccccacggaaggcgtaaagttccaaccggcggctttttagtggctaaagggtaattgggataaaagaaaatatttgaaaagtcaaatataaattcaaacggtatttgaataaattcaaataaaatattaaaatagaaaatttgatatcaaaatgtagattttgaatttagatgaatttaggtccaagtttcactggaatcggatctacggtttaggagatatgggcttctaaagaatagaatttgaattaaatagggaaattacgaaatagtactatacaggggcccacctgtcagttcttcgtctcttcttcttcttttctctttcttcttcctccttccttcttctgcttcttctcttccagccgagcaaacagagagaagggagaggaggggcgccgatgctccggtggatgaacggcctcgacggcagcggccacgcgtgttcccgagcgacgcgcacccggggaggtcggtggctggccgagagtgagagatatatagccggaacggcggcggcaagggctcacctcgagccggcatggatgaatgcggtggtggcttcacttaaaggtggagggagaggggaaaggggaaaaacggactctccggatggaggcgaagccgatggcgcgaggataggggaggtggagctacggatggggagatcgaccgacggcgtcgacgatcggccatggatggagagagagaaagggagctcgaggctctgttgatgtgtggagaaaaggggagggctcgccttatatttataggcggcgagaggcggtggctgatggcggttcagaggagaaggtcgatgaggacacggctgcagcgacgtggagaaaagaatgacggcgccggctctgtcctctgatcggccgacgatggcggttcgtccctgttgctgacgtcggcggaatgaagtgtagctgacgtcgggtggcggttccttcgcgtcgacagcaagatggcggcggcggtagctgagtcgtgcacggcggcaggtaatggcgcacggtggcggcgcctggaagcgcccatgggaggagaagcagggagtcggcttgggtgggaggggctgggccgacttgggccggtctgggccgaaggaagagagagaaaattccgcccaaatgaataggaaggctttctaatttgtgtagggaattgagggatggaatttaaatccaaattaatatttggaagaaatttaagtggctaacctttgagatgaatttattttggagataatttccaaagagagatttcctaattatttgagtgcaatattttagaggtagcatataatggaatttatttgatgcactcaaatgaaagggtaagggatatatgaatgaaattgaatgtgtaaataggaaggtgggaagaagataattggagaaggataagtagggttttagcctcaaaatatatggcatgggtttcaaagaattgtttgaggctaataggaaatttggatgacaaagatataatctattttcttagcacaagagtgttaacagtgaaatttggtaagcccggagtaatcatcggcttagagtcagcattggcttcaaagttctgagattagccgatgagagttgccaagtcgtcagttgtcggattcttgctatattcggttaaagaaattgatctactaaaggaagcttatctagaagagaccgagttcaaagagaatacggcatggtaagttatctactaattaggaatagtttgttagtttccttttatctttaggaaagtgtgtttagtgtcctataaggactttatcttttccttttatatttaggaaaatttctttcttgtccgataaggacttgtatcaacccatgggtataaatatgtacacccggggtctatgtaatttatctttacgatcaatacaattcggcacatcgccaccttttatcttttctactttattttatcgtccggcgggatttggcacctgacgtggggttgcatcggtgttcgatctctggctaagaggtaagtccaatgttctgtcggtccatgcaattgtatcgtctatgtcggcgtcatttaaggttgcatcagtacattcgacctattggattgctctggtttggatgatatttttgcctacctatttatcatatgtctttgttaatctagtcttagcatatcaatttagttctatcggctgcttctcgttttagggtttctgccagtatcggcttaatcgcgttgctagttagattagcttagacatctaccaccctgaaaactcagtcaacggtttgattgtctagatattatgtttcttttcatacttagtgctgcatcagatacgtttgattgccataatctctagcctgcttcttgattgccaataagggtttcatcggggtttcagccggtgagttatctggacgttgcatcggctcataaggattgcatatacatataagttggatttagccgatgacaacaaatgtttcactgtttaatctaatcttgtggatttcatgacatcggacctcctgccgatgtgtgctttaaccttcggatcaatgcttatttatcatatcattatttgctgattagtttatactggattatattgttattttattacatcatcatcaaccgatttcctttatatcattatctacattggacatatagccgatagcacaaaaccctatcactatcggctggtatcggcatcggctattatcggctatcggctggaactaatccatcggcttgtcagccgatcggctgttttaatctactatttgcatatcttgtcagttgcaggatcaaactgactggcacgcccgcatctcatcatatttggacctgcaaaggagctaagcagatctctcaggccagtgtgttcgattttttcgtcaacaaagagcaattattcataatatttgcaataataatatttcttgtgccgagaagaaaatcaagccacaagaattaaattggtggctagattaaaagaaatgatttggatatttggatcgagaatcaaaggatgggttaacaaataattccaataacattggaattgcaaggatttggtttgaaggattttccttggacctcaattcacaaaaataaaagagggttttcaaactaaatttgaataaaaggaattttgtcagaataaggttttaaattaaaaccaaatcaagaaatatcccaagataattttaaatgaaagtcacaaaagcttttaaatatcaaaaagggattttatgcaagttagttttaggaggtcgctctaattatattttcctaggtttaaaaggttaataagaacataagaactggcatgatgcataattagaaaattctaaattttcagtatgttacaaaatgttcacatctacaaggcacgattggtggcgaaatgtttcagacaaattcaaggtgttgattatgatgaaactttctcgccagtcgccatgctaaaatctattcggattgttttagcgattgctgcctatttcgatttgagatatggcaaatggatgtcaaaacagctttcctcaatggaaatctcgatgaggatgtgtacatgacacaacccaagagatttgttgatccacaatcagctaaaaggatatgcaaattgcagaaatccatttatgggttgaagcaagcatctcggagttggaatattcgttttgacgaagtagtcaaggtgttgggctttgtcaaaaacgaagaagagccttgtgtatacaagaagattagtggagcgcactggtgtttataatcctatatgtagatgacatattatagattgggaatgatattcctatgcatgaatctgttaagacatcgttgaaaaatagtttttcaatgaacgacttaggggaagcagcatatattctgggcataaggatctatagagatagatcaaagagactaattggattaagccagagtacatacattgacaaggtgttgaagaggttcaacatgcaatattctaagaaaggtttcttaccaatgttacatggcattaatcttggtaagaatcagtgtcctcaaacgactgatgagggaaacaagatgagtgcgattccatatgcctcagcaatcggatccattatatatgctatgctatgtacacgtccagatgtttcatatgcacttagtgcaacaaactgataccaatcagatccaggtgagagtcactggatagctttaaagaatatccttaagtacttgagaagaactaaggatattttcctagtctatggaggacaggaagagctcgttgtaaatggttacacttacgcaaccttccaaaccgacaaagatgattttagatcgcagtctggatttgtgttctgcctgaatggaggcgctgtaagttggaagagttccaagcaagatacagtggctgattctacaacagaagccgaatacattgccacttctgaagcagcaaaggaggctgtttggataatgaaattcgtttctcaactaggtgtgatgactagtgtttctagccctatggacctctattgcgataatagtggtgccattgcgcaagccaaggagcctagatcgcatcaaaaatctaaatacattttacggcggtatcacctcattcgcgagatagtgggtagaggagatgtgaagatatgcaaaatacatacggatttgaatgttgcagatccattgacaaagccactccctcagcctaagcatgaggcacacactagggcaatgggtataagatacgttcatgattgactctagtgcaagtgggagactgttagtgatatgccctagaggcaatcatagagatgattgtatcacatactatgtttacatatttattcgactttgttccttgaaatagataaactcattattggttaatgaatatgtgattctttcatgagactctttatgttatgtgttgctatttctaaaggatccctaatcaaatatcatatgtggaacaaatatgtttagatgatcagcacatgtattaattgatgatcatgtctcatggatcatggtatagagataccaaattaataatgtggacacatgttagtgaacatgttgttggatagacccaacatgagacactgcaagagccatatgtgttgtgtcatcagttatctcatttagtgttggtgttgaatccttagacctgagattatcatggttcccaacatgtgttgtagcttacttagggactgctaaacgctactccgtaattgggttgttataaaagtagttttcgggtatgctatgaaacatgtattggatatgaataatcaagatgggatttgcccctcctatggagagatatctctgagcccctcgatgttgtagattatggaagttcatggccatggcaaaggtgattgaggagtcaatcacaagttatataatctatcaacaggttcgagtgaatgattgagctattagaggatgacacatatctagccttgagcttaatcgatatcatgaggcaaaggggttcatacaagtatacactagaggttcagccgatatgatctttatgtatgcccggtgtgtcaatacgttctactaggggccgctattgacgcgtggaccgaaaaagagttttcgggttacagccaagtatacatgaacctacagggtcggacgcttaatgggccggaataaggggattggatggagatccaatatgagcttaattcggatagggatccgaataggagtcctacgggcgttggaggcccgagtgatggatcctatatattcgtgaggggtgtggccggcggaggcattgcatcatgcgagaaaccctagccgtcacttccctcccccgagcaaaaccctagccgtgcgcgggtgctagcacatctgcgcgtggcgttccgtccctgtacgtgtggataccggtagaggcactgctggtttgcggtgctgatcggcatgggagtacggcgaggagaacgcacgaggaggagaaggtcgagccggtgtgcttcttcgcgagagttccttcgacttctcagcgtcttctttcgctgcgcagcgcgtcgagtggtaacgatctataatctaatacttgcatggttcctggtttacgcgatagaaaattttgatttatactatcgtagcctacgcgtatgccaacatcttctgcttactacctttttgcgtgggctacaaatacctttttgcgtgggctacaaatctatagtattttcaaccacttgtgtttaggctatttgctcatgcatgcatacacttggtgcagtatcttctcttcttatcttttctcttttatactttattagcgatctttaaatcactttttattctaaattacttatcgaatatgctatccaagtgcacccttaaattcgttataattaaatctttacaataagatcggactcggttatatttcggataaaaaatatattgaaacatttttattagatacatgaatcatcaagttgtaaccattgaaacatcacacaatatttacttaaacactcaaataataccatgtgcaatcgttataaatgagcttgtgaaacatttctaaatactttaagcttatccaaaaacaacgcatgcattatttgcatttgaaacaagtgaaacagcaaaaagtacttcttgaaacatccaaataacaccatcactactacaaaggtcattttcgctgatggccaaaatggatttacatcgacgaatgacagcaaaaaaaaaaactattttcactggcggcaagataaagacaaccacaagtgaaaatattttttggattaaaaaaatggaaaacagtatccagattttgaaaaaaaaatgaaaatcgagctacatgacaccatagtcagcggtagggaggacggaggtcgacgacgaggtgggtcaccaactccagatcttctctcctgctggttacgctaggctgtcgctatcaagcccggccaccacaggtctgaggagccaagccgccaccaccatttttacacccaaatttggcatctagagataaaatagggaaaattgccaaaatttagaagtctgctggtttttctttgtgagggccggttctgaccaccgtgtgttggccggtcagaccgtcgacagtgggctagtcagatcggcggtgtgtggccggtctgaccggcagagcccgagcccgagtctgtttcatcgggtttcgagtttccttgctagggaaggctatgtttcgtgtttcctttggtttctatcccgagttggacgtggagaagggcctgtagagggcaagaccaacccctatttaagagataaggacggttcattgtaaagccccgaatataatctacttgaatcgttcctttaccatgttttctactttaccctagttttagtctatctttgtcgatttgtgttgtaaatcgtccgctgccgctgcgagagtgcgacacctctttgtaggtttgtccttccgttttgcccacgagacgcgtagttatcctcatatcgatctaaattggcctagaggctgattttgatctctaaatcggctccgctagccggtttagccgtttttctacaaaacccatcttgattcggccatttggctagatcgaggtggttggcgactccatatcactgcaagacgtttagatgctgcgatcgtacttatcgacttatcaaaaaagttgccaatacgatttttgagcactccctggggaatcgatcaattcggtcatattacagccgaatttggtttactctagtcatctcgtcaaatcagtttgtttccgccaaacggccgaaattaatctacaccttaattgttatagccgctgcactgttcttatcgctaaatctattcggcggcaaagctatttggtagtcatcaaattcatatagcacttgccgtgtgtaccgaagataattatcaggaagcagcagccggcttagcaacgtttcctttttgtttcacacggcaacaaagaaaagatcaggctactagagtcgatctaccgatcaacagcagcaggtattgctgtacacggcaggaaaatttgaatcttactcaattcggtttgctgagtatacgagttctaaaaaaaaaagagagatcaggctatcaaaagccgatttttttctgcccacataccgaaaacaaaaaaaaaaaaacatagcagccgatcgaatctaatagatcggttgatttttcggtatatttgctacagtaccgagtaccctgtatcaatcaacaaaggctagtttttgataaaattggctaaacacagtgacatatcaagaaatcaaatttattcgatcaaagatttcggctatgagctatatggccgaaattaatgaaggaatttcttcatcaactatgacgagcggaaacgggttcaacaatattactacacaatacattaggaccgatcaaggcgtcgtgaaaaagaacgtcccgctacctcaagttgtagtttcaccaaaggtaacctccgattcgcccaactcgtcctttgctattcaaaaggttaataatcgttgtgtagatgcatatgctacttctagttttgctcctatacaatatgcttataatgctatgggggtcaatggatgtttatacatccgattacgcaggaatcggctatatgcagaacctagctaacgacatgaccggtcgtgacaccggtctaaccgcatcctatgccagtcagaccgtacccaccatggccggtcagaccgtgtactacgccggtcagaccgtgccctatcctgaccagatagcgcctcctgtggccggtctgaccgcaccactgaccaccggtcagactgggccatgggccggtcagaccgggtgcttggcctgtcagaccgggctatctatagccggtcagaccggttccctggaaatttctccaggttttcattccacgactagcagtactgattttaattattataaacctattaataccgttagtcatactactccacacatccctaatccctaatgcttacaatgatcctaatggaggatattctcatgacactgggtatggccagtataataatattgtgccgcaacaaccaccccttaggccaccaaacccaccactagattcaccgaggcctgaaactgtggaggattggcttagaaatattatcagggaaaatttcgcagttgagccaaggaatcgtgctagagagtaccaaaagccatatcctgattattatgatattctcccatatcctcgtgattatagaatttctgaatttaccaagtttagtggtgaggatagtaggaccacatgcgagcatgtaggtcaatttttagcgcaatgtggtagggctagtaatatggatacatgtaaattgcgtttgtttttttatctttgtccggtactgcttttacatggttaacttctttaccggcaaattctattcatacttgggctcaattagaacaaaaatttcatgattattttcacactagtgaaactgagcttaggttatctgatttatcatcgattaggcataaatacaatgaatctgttgctgattatattgaaaggtttagagatattaaaagccgatgtgttagtttgaaaatatttgacaaagatttggccgacattgcatatgatggattgcttgattttattaaagagagattgaatggccagatatttcttgatgttgatcatgtgttgcatgaagctctggctcaggaaagccgagtggatgacaatagcttaaatgctagtttagataatagtgcaatttcatgtattgccgaaccaagcgatggttcggattgtgctaataatttgtgcaatagtgccataataagtatagccgaaacaaatgttggttcggattgtattactaacttggataacaatgcaataaccaatatagctgaaccaagcgatgattatgattatgttactagtttagacaatgatggaatagccgaaccaagtgatggttcggattgtgttgctagtttagacaatgacaccattgagagtataactaaactaaatgacggttcgaattgtttcacaagcgaaactgaaatagcattgttacctaagaccgaatcacaaatcggtcatgtgaatgttggaaaagatgatgacaatgtcttgcggtatagcagtgaaatagaatcgtaagtagctatgcatacataccaaaggccatatcctaaacatgtagattcggtcccatacccgcaaggatttgaggtgcccaacttcacgaaattaacaggtcagaatgctatgactacaatggagcatattggccaatttactgatcaatgtggtaaggttggtagtaatgatttgcttaagttaaagttgtttcctctttctttgtcaaactttgcatctacatggtatagtttacttgctcctagttcaatctctacatggtcacaaatggagtatgagtttcatgattattttaaagatgtaagcttgatggagcaaaggttgattgatgattcatcggtcacttgtggaactatttcggttacacctatgcctaagaccggaattattagtgatcctctctctattagtcctattgatgttgacaaaaagaaatggaaaagtgttattattagggatcctcggcccaagacaattaggatcaataattcaaaggccgaagatcataaagttgcaaaggatgagtcatctagttcccaaaaaactaaaaagttgaagctcacttttgagatgcttatggctaagtacaagaaaggattagctggtcaacgatttcataaccaaactagtgattcaaaaagatcaagatcatctcgtaggaagagatttggacaaacaccaaagcaatcgcagccatcaactataccaactccatacaaacctccggttgtgatgccaaggtatccatatccaatgtcaccgtttggttatcctttcatgtattacatgccatggatgcctcaattctctacgccgtttcatcaaggatggaaggaatcacctaggtcagtaccaagtcattcatctaattcaagacaagaccgtttctcgtaaaataatcggtccggtggatcaaaggtgaaaaaggtaaagaaggtgtgggtgagaaaagaagccaaagctctggcggtcgttattatcaaggaggagtctcaagatgttcaagtacttactgtagatgcggtggaaatcatacaagcaaaggagatcgaagccgacaccgtgattgtcaaaagcggaggtctgactgaggcgtctggctggtctgaccgccagactacggccggtctgatcgggcccagaggccggtctgaccgggcggcattagagaagagtgagaaaattgagagtaacacaggagcttctactttaaccaaagatatcaagaatcattgcttggctcctgaaaaacaaccacagccgtagtggataccttctggcttatctcgctctcaaaagaggaggctacaacgtcttcgggccatagataaaaaagaaaaggaggccgaagatgtggagaacaaaacatgtaataatttagagcctcgaacagcatctaagcaaatgtggagacctaaagaagtaaaagttaagagactagtgatttcccaaagtagtgatagatttaatttggtgagagaagaatcatcggtcattagagaaaagttgccttcacatgatgctatggttgttagtgcggtatacatcttgccttcgaaatcgtgcaatcaagaaaatcgattttactcggggggcaagacattaatatgctcatgaagaaatcaagagaagatgaacggtgatggatataacatttcatctttgagccgccgtttgttggatgctaaggcaaggtatgggtttattgtgttcatcattatattatatgcctatgccatgttagaacattgcttgctatctagcacatgtgtttgcttatcaaattcacattacacatacatgttgcaaatgccagttctaagtagtagaatcggtaagttggcatataatttgattgaggtatgatttggctcatgagtctttgatatttattaaaagccaaatcatgttttttttatggatcaccacagaggatatagatttcataattattgcaccatgaaagttttgcttattagtaatttggctaatgtcaatggtcaatgtgatgatttgctctagagtggttttctttaggaacgttggcattgttaatattttgcatacatgctcaagccgattacttacatttgtagtttattggaatctatgcatgtgacacatatgactttggtgattcattattgatcatacttcaagtggctaagtgtttttgatgccttgatgtttattgtttcaaaagccacttgagttagtattcatctagacatattagttggatgttataatttttcgtatgtctaaaaataagaaattttggtccaataatttgatacaccaagcatctggctataatatgaagaaaggagtattttttatactagaaaagtcggtgcttgatttttaatcttcgggtgaccaggggcagtctgaccggcattgcacggccggtctgaccagtggtggacctacggtctgaccggctctgcatggccggtctaaccgtgcagacaaggcagtctaaccggcattgcgtggccggtctgaccgatcttgggtagagagctagggggcacgttacaattgattcaaaggccgaattaattattaattcggatatttgtgcccaagagtcaaaagaaaactagagaatccctttgaatagaatatttgaaagatcctagtcttagggttgatcggaaaattcggcggcaagtgttcaaatatactttgcttgatagagagttatatcgccgaaaaatagatggagtaattttgaagttcttagataatgatcaatctaaggttgctatgggagaagtacatgaagggatttgtggaactcataaatcggcccgtaagatggattagttgcttaggagagttggattctattggccaaaagtgattgatgattgtttcaagtactatagaggatgtgaagtttgtcaacggatcggcaatgttcaattagcgcttaccgctgtgttgaatcctatcattaaaccatggctgttccgaggttgggctttggattttattggtcaaatttatccttcgtcatcaaaggggcaccggttcgtgctaattgcgatgaattacttcaccaagtgggccgaagccgtgccgttcatgaattttatttacacggaggtaattgactttgttttgaagcatattgttcatagattcggtactccttaaactttgatcaaggagcttcttttatgtccaaggaggtgagaagttttgccgaatcttatgatattaagttgtggagttcttcttcttactatgctcaggccaatggataagccgagtcgagtaataaatcattgttaaatttagtcaaagagaagattaaagaacgtcaaaagaagtggcatgaagtgctttcggaagcattataggctcataggatatctaagcatggtgctaccgaagtcactccttttgagttggtttctggacaaaagccattttgccagttgaggtaagtcttggctctcttcggtatttcaagtaagacgacttgtcggttgaagattaaagaccatgatgggaggtaattttgaagacgtcatcggtaagtgtttgaacactttgaaagagatggaggcactttaagatggtgttttcagagagcaattaataggaaatacttgaagaaatacttagcgtttggcaagatgcttaggaagttccatggcaggtaattggattatcgccctaagacaacatgttctatgcttttaggttctcgatattcatcaaaaagggagggggggagatgtgtttacacccaaatttggcacctagggataaaatagggaaaattttcaaagtttggaagtctgctggtttttctctatgagggcctgtctgaccgccgtgtgttggccggtcagacctccgacagtgggccggtcagactggcggtgtgtggccggtctgaccggcagagtccgagcccgagtttgctcgagaaggctatgtttcatgtttccttttatttctatcccgagttggatgtgaagaagggcctgtagagggcaagaccaacccctatttaagggtcaaggccggttcattgtaaaatcccgaatataatctacttgaatcgttcctttaccatgttttctactttaccctagttttagtctatctttgtcgatatgcgctgtaaatcgtccgctaccgctgcgagagtgcgacacctctttgtaggtttgtcctgaaaaccttccgtttttcccacaagacaggaaattatcctagaaaaatcggcctagaggctgattttgatctctaaatcggctccgctagccggcttagccgtttttctagaaaacccatcttgatttggtcttttggctagattaaggaggttggcgactctatatcaccgcaaggtatttatgtgctgcgatcgtgcttatcgacttgtcacaaaaagttgccaacacaccactcctcatcttcgttgacgagccgcccctcctcctcatcgccatgccaccgccactcctcctccttgtcaccgagctgccgccaccgctcgtcttccttgtcggcgagccgcccactaccgcccttgggagtcgacgccgcctaactcggcaccggatcccctacacacgaaagtcgccactaccatcgcgtgactcaccgccgcaggatctgccatcggcgcaccttgttgctgctagactcgccgccgccggatcagcctccagcgtgagttgccgccgccggatccaccctctacgcacctcgttgccgccggacccgccgcctcgcgagttgctatcggatcggctgcctcacgagtcaccgccgccggccctcctcgcgattcgttgccgccgaaccccctgcacgtgcggaaggaggaaggaagaggaggagggataaggagacttggaggggtcactggagacatctagaggggggagggcgtggagagttttaatagggctgtagtttttcacgacgatgctcttcagtggctactagcgaaaatcgattttcattggcggtcacttaagaggtctgtaaaaacagtgttatttttaatggcagatctcttaagacgaccgcttgcaaaaatagattttcaatggcggtcactaactaggaacctcatgttgtattttcactggggttttctattttacccgccaacaaattaaaacatgtggtgccaggaaaaaccatttttgtagtagtgcatgtgcaacacttaaaaaaaccattaaaaaagtgcaacaaagtggaattctagttgaaacacttgcttgtttacatgtgaaacatcaaattttaatgattgaaacaaatatttttttgtcaaaatataagcttgtgagatcttatggtaaagatttaattacgatgaataagatgaatcagataaatagtgtaggaaaaaataatttaaaaaggtgctaaaaagagctatttcatgggaagaggaatgggtagtcaatttgaattgggaacattgaaatttttgttagggattggacgtcccatactagtgttttccaaagttctagtatctctatagctatgcacttttcactaattgctatggtttgcacataaggtatgcggtgtgtttcggtgcagggcattgcgttagcactggcatttgtttaaaggtttgttcttcaatgtatcgtactagttgatttagggtggataaaaaagaagatgctttaaatacttctcctgagaaacttggctgatatggaatatatccgcttcctccagtgatgaatgttttaaggttaagacttcggcaaaattttaaaaatgaccatcactaacttctcaatgcatagttttaaaatatatatacatactatagatttgaggactgctagagcactgactcccgttccaacgggataatttaatgagcatgactatttgaccaactaacctctcttattattttatcaacttcaccccacgtgagggttcatgtgtcagcccacgtctcttcgtgtcctcacaagggataacacgtcagtgcacgtcttctcactagagacacaacacacccgtttcgattgttatgatgctaacaccagggccattttgagtaccagattggtctaggtaccaggtactcgatacctagtatcaggtctgatacatatgtgtattatactgatcaaagtaccaagtacttgatacctaggtacccgatacccagtgccaggtctggtacctacaggtatcagactgatctagataccaagtacttgatacctaggtacccaatacccgtactaggtctgatacctatgggtgtcagatcaatctaggtatctggtacctacatgtatcaaattgatctagataccaagtacttgatacctaggtacccgatatcagtactaggtttggtacctatgggtgtcagaccctaggtacctggtaccctgatacctgaggtatcaggcttgctacttatggtactaatccggataatctgggtaccagttactcgatacctaggtatcaggaacttgatacccaggcatcaaatactctgtgagtactatgtattcacactgatgagagccatgaagagaaaggaaagaaggcaaaggcaagcgcgaaaatgagatggttacttccttagaggtggagggatgccattcattcttgttgtcatcctcgatccagagcatcgttgcccagatcctcgacacccacacaagtgtgatggttgcagacatcatctgcgacacacctcaactcatctcccaccttgaacttgttgcatctcttccccgaccctggcatgcgagagccccatggccaccgtcggtgatgcgacattagcacagcaagcgctggactattccgatcttgttaaagggcttgccatggaatcatgtcccaacctctgctaggaacgaaaagagaagttacagagggagagtggggcgaaggatgacgacgaagcgaggatcggcgagagagagagagagagacagaaagagaactgataagaatggatggttatccacttatcccgtcaccacgggatgccgttaggtagtttttctgaataggttagctatgtttttccctctttattctttctcacactatgaatttaatgcatattttttggaacattgatagaattagctcttgcacgagagctaagactttctatttttctttctctctttctttcacataagcttatagctaatggtatttcttacgttcacagttaaattcacaagcacacgaatatcattatagcacttcgcccatgagtatttctaagggtatcttatttatatttttgcagagaaggcggtagtgtaaagacatagtttatacatcattagtcaacctataattaattaacttaccatagtctaaataagggttaggataaatatgattaaggggtagtgcgatgcacacatacatgctcacaaggctagaacttagttcttggtattcaaatactactaaaaaatcactccatgctagtctgccagcttggttatgtcatttatgcactcttacgtcatacccaatcgtggagaaatacagaggattgtcaccacgtgttgcctccctcactttccgtggggcacacccacacccaatggcatttatctaacctaagcaccatatttatggtagtaaataataaaactaactccctcgggactttcacctttcggatggacaagttagagctagagcaacccatcaaggtcgttggaccgttacctcaatatagatcgactggcctacctagtcaagtgaaacatataaatgaattacatcctattcataaagaacataactactaaagcagtatataaattatgaaaataagaatatataaataataattctattaattcaactatagtcttacaagaaaagtaaagtgctaaaggcatactgggatctcaagaaaactataggaccgaagataattttaacctatttccacaaatattataaagatacaatatgaaatagagagaatagctccttaaggagtgtgttataagtaagagagtgacatccttttatagctgctaatgacggttggggatgtcagtaaatcccataatcgtaattgaggagtcaccgggaaccgccaagttaacaatagcttatttgtagcttactattatcctcgctttaaggcgcaaaaaacaccagtagggagcagaggtggacttagctacatatatatattgatttggtggccgcaacgatggatcagacttgtgcgtggcttgcatcggatgtgactctagaacatgcaaatttagtaattaattaattaattaattactaatgttctttttttttcatgagaactagtaatgttcaggtcggtgttaggtgctcatatcgtggcatttttatattagaatataaaatactataagttttatgatattgtgatagtagttttcaaggcaaaatctatagagagctgctacaaaacaggattccgttgtaatggctgtcacgaccggaattaacccaacgggcgttcctttcgtgcgtgtattattccttgtcccaggaggcaaggtacaccaagagttgatacaattcagagtttaacaagcggaagcataaatagataatttattacatgggcgacgaaggcccagcacacacaaagacaaacgagaaacagcggaagactagggcgacgaccacaggcgcttgacggcaggcacgagctagacaccaaagccttcatcaacgaggggctcctcttctgggttgggaaaaattgagcaagactgagtacaaccaccgtactcaacaagacacacccacaagtgcataataaatgcaagggattacaagggagttataatataaagggttagggttgcagtaaacagcatttaaagatgcttagttgctcaaagctattttgtaaacacgattttagaactatgcaatattatttatcaaggccgtgaacccacacgaacctgccttaacccaaggcctacgatgattcagaccgaaccggcaacccgaccctgggtcccagctcgtcccaagccaacccaggccaaccattccacattttagttgttaagcaggttttaaaaattaaaacactaacttgggtacattgctcggcttgcccataaccgagggcgcggctattcgaatagattatactctgatcagaggtgtacatctttacccacaagacacatcttcctcacgtgtaaccacgtgccacataccaccatggtatatggacggaagacatgacatagtttccaacccatcctagccatagacaagagtaccgacccaatcccacctacggccggaacccccgggacaggcaggcaggactgagcccctagcagcaggacaccggccctgtgccacgacatctcgactaccgggccgcagctcgtgtagccttcatttgccctagagatgtccatcgacccccgacttcgtccatctccattcgtgtacttttgtttataaccagactgagccacaaactaagccttacccactagacatgtggaagtacggtagtactttgcaacagaggcccgaagaccggtccttatatggccgaggtgctactatcaaaaccatgcaccccgagcccagcctaaaaccattttgggaattttgaatagaggggcggtgtgaatccaattccacaatactccaacaattccaaagtgtccaggtgatatgaatatcccaaagtatagagttgtaaaaccgcctaatgttacctaattaaatagcgaagcatctacctaacatcatacaagtggtaccatgagtagagtgtccactagttggggttttgtttaatctagggtgaacaaggaaataataacaataacaataataaggtcataacaaaggtaaataggcttttactctaataaactccatataacaagcaaaaacaaagcacaaaaatgggttcttgacttcttaaggaaaaattagagacttgaacggtccaattctgagttcaaatggccaagttatggccatttgaaggttatatgctctttaaatgaatatttgcgaatttcttcatttaaattttaatttaaaatttggatttattgcgtcagccgaggggaggggcgcgcggaccgggtccacgggagtggggcccacgcggcagcctcacggtccacggtggaccgggtgctcccggctcacaccggccggcgccgtgggtcccacgcatcagccgcacccgagggcgcgggcggctgacggccgggccccacatggcagccgcggggcgcgcccgaaggcggccacgccggcacagccgacgggaggcggcgcacccgcgccccgatggtcgcggccggcgaccaccggcgcggcggagcggcgcccgagagaggggagggaagggggaaacgaatcggcggtccacagctcaccccgggtcgacggcgacgacgggaacggcgaccggagcggaggaaggcggcggcgcggctcgggtagacggggacggcggcgttccggcggtcggcgggcgaaacggaggggtggacgaggtcggcgaggttgcggcgaaaccaaaggaggcggcgccgaagcgggagaaggtccggggcgacgacggcggcaaaccggagctcggtggtgacggcggagagagagagcgacggcgcgagctcgattccggcggagagagagagcggcgagtggcggaaacggtggagggaggcacggggagtgtttatatagggttgggagtgagagagggcggccggatgagggggaaacgggcgcggaagatccggccgccattgatgcgccggcgaggtttagggggaaagattccgaacgaatccgaggaagagagggagggaaaaatggggggaaagagggagggaatcacggggaatatttcccccctcttgattgcacgcggggcggacgggagcggcgggatttgcggcggcggcggcgctagggcacgggcgagacggcgggagcggcgggaggaaggggatgacgggtgggccccacccgtcagcgagggtggcgggcgggcccgcccgtcagcggcgcgcgcgcggggaggaggccgaatgggccgcggggaggaggagagagagggaaggagatgggccgagccggcccaagagggggaggggggaaaagactttttaggatttttctttttataaaatcattttaactttgtttatttcttaataattattatttgtgctctgaaaattccactaaaatttatttacgcattttaggcttttaggaaatatacaaaaatcctccaagccttatttgacttttaactttgcacattttacttgtgggaggctttcacaaggattttaattattctaggcataatttcgaggatgtattttagagtcattttgggacgcgacaatggcatagacatattaactattatcttgcacaagtatcacagatattagatcctaggtatcacaagtaccgagtaataggtatcacaggtatcgagtactatgcagctggtaccataacagaggtatcaggtactgtctcataaaagggtatcccgttccaataggataccgttgtctgttttctgattatatatataagctatagtataggcttataattagtagtgagctctaatatttaacttgctcttgtgagcacacatccattaattagctcaaaatagctagatactgtacttcatgcctgtgtccgagactctcgacagaaaaaacacatttttggtgggtactcaaatcttcacatgggagtatgggctgacatgatcataggattatatttacagccgcatgcagaaagaaaaaagaaaggcagctagcgagctccctcctaccgaccacagagatgtgtatatatatatatatatacatatgtatatatatatatatgtatatatatatatatatcttaaatcacaattgcggattgcatgacatttagatttttagatgttgaactagcactggtggagaaagcgtttgtactcccggttcgtaaaccccctttagtcccggtttccaaaccgggactaccaatccgggactaaagatcgctatctttagtcccgggtgaaataaccgggactaaagatcgatctttagtcccggttggtggctcaaccacgtggccggctgagccatcgttagtcccggttggtgttaccaaccggaactaaagatcgagctgaccttttttttttacatggccctgttgctgcaaggtttatatatatatataaaccatgcatatatatgtttcaatatatacacatatatatgtatatatatatatattatattatatttatatatgtttcaatacatatgtacatgcataatatatatgtatttatacatatatatatgttatgcaaatgcatatgtatatatatatgaccaaaatatatatttacattatagaaaatgtgtacacatgcatatagaaacatagtcatgtattaattacaatccattatatgtcctagctagctacgattttgacgtagtagtagtcgctatctcagacgataaggacctatgaattgtatttccgtcgtagtagaattcacccttgggatcaaggatttgttcgttgatgaatcccatgagttgttcttgaaccgccgcgataaattccttgtgtgtgatcaggttatccctcatgcgaataaactatatgaatgtatgaaattgattagtaattaaacaacaaaccgatacgtaatgaaattttgaatttatttgtacgtacatcaagctctcttgtggtgatgatttggtctgcaaggcagtggcaatactcgaacatgtagtagccgcacaagttaattccctgcttttgctttgcgcactataaataaatgacaaacaacgagagatctaattaatatatacttgtatgtatttgaagcggagaaatataaatgtagagcatgtgtactcacaggaaatttgaacttccgctaagtctttctctccatttgccgcgaatcaaatgacggaaccaataccaagccccacatggagtttaaagctatgattcgtagtagaaattaactataacaagattcttaattaacataggaacttatgacagtacctatctataagttcgaaaaccttgtcaaacgtagactcttttttatccattgagtcatatacgttgacggtgcaggcctccaggtcgaagagtaaaagcacccagtggaatctgcaatgtgcgtgggatgcattacatatgaaacacttagcatgttcgtacgggaatgaaatttggtataggaagacagtaaaattaaactaactctgtgttgtacggcaacagtatgaacatcttgtaatgctgcgccttcaggagatggacgagattgtcctctgtggcttgcggatattggtcgagcattgcaacgtttactttccgagggtcgatgaatccagtatcgaaaaccccccgccgtcgggccctttgaatctccattctacaacgataaaagagagtatatattttatatagtctacttatatacaaggacctaattaattaaaggaaacgttgtaagaaatctaactgaacgatatacttacaaaatccagcaactcataataaagacgtcgagggcgtccagctggtatagttcgtagaatcccttgaaattgatccagagaatgtcatctccttgcaagaagtccgtgtccctgatcctcgctccgatcatctctctaccggtggcgctcatctccatgtacagctaatggtacttgtacatttgtgtgggtagggactacagcagctcaagcttgacaagcggtttaccgagttcgtacatgtatttcacttccgccttttcgattggtgcgtctcgtagcaattgatccgtagttagtccggtgtcattaataaagtcttgtattccaaaatcttcaccggtcaccaacggctcgatctcctggtttagttgctctccaagctgagggactggtttggactttccagaagatgctttcttgagtgttcgctcatagtccgatagctttatggcctccttggcaggtgcatacatacccctgaagaagttcctgacactcgggtctataggaatcttcttttctggacttcgaggcttcaattgtctcctgacttctaatgccacgtaagcgtcaagctcctcttgcgtgcaatcgtaccctgggtccttgttcttggcggtgtcaactttcgccttcttcgttgcccttgtgggggcaggcggtggagcttgggggcccttgacttggaaggtgccggaagaggagcttgaggaggagtcggtgtaggagcctgaggaggagtcggtgcaggagcctgaggaggagatggcggagccggaggagatggtgcacgagacgccgcttgtcacccagggaggatgatgtaccgcttgtgccatagaataatggcgtggcttgtgtctcgtagatgcgtctcaccgtctcctccagggtaatccagctcgaggtcctcgtacgcgccttcgaccaactcaactttgaccttggagtatcctgctggaatcggcctacagtggtaagtacctgaagggtccgttgggatggccatgcccgacgccaccttcatgtggtgagaggttatttattagtaatcaacatatataagcagcaactagcggaatggccaaatctaacatctataaactacgagcttacctttattgataagttcttgaagggaatatgcagctcacatggtgtccgctgagtgatgtcatcaccgggcaggtggtttcgtcctgggtttgcatggcgtccatgctctgtgatcctacctgccccgttgaggcgcagctgctacgatttcctgacgggctcaccattgcaggagaaatggtcggctagggatcatgggaccgatgtgcgtccatgcgttcatcaaccttccttgccacctcctcttgcatgctgagctcgtagctcgataccctgaactcaagatctgcaatcttcgcctcggtatctctcttgctcctcatccgactcctatacgtgtggatgtcctccttgaacccaatcttccaaggaatcacccatttctctcgtgttcgtcctggatgctctggagtctgcagggcgagtgacagctcgtccttctctctgtccggtcggaacgtgccctaagaagaggcttccactgcgtctgttagtcaacacgcagcctcgcatatctgatcgccgaagaccagggagccatcagctgggttgagcgttccaccgtgagcatagtaccagaacttcgatcgttccggccaattagcggtggccggttcgatacccctctcaagcaagctagcctccatctcctcccacttcggcatcacgatgctatagccgcctgaccccaagtggtgatggtacttcttcttggcagcattttctttgtttctttccatcatcgcctgccctttttcacctgtcttatatgcaacgaactcgtcccagtgatcccttagctttgggaatgtgttgaagttcggtgtctgccccttcaggatatatttctggtacagatctcccttgaagctctgaaactgttctgccattttcttcagagtccaccttttcactttgtcctctgtacccgcgggaagggtgaatgtttcgagcattgtggtccacatcatctctttctccgaatctgggacaaagctctcatgatctctgcgtgcccttgttctgcgccagtacaccgtactgacaggcacgttatcccgcacaacccaaccgctgtgacgtacatagttcttggcggcttctgccggggcactaggtcggccgtcttcgtccacttccgttatgatgtgccgaccctcaagcttctttgcggcacctcgttgcccgcgtgccctcttctgtccagcggagggttgacttccactagcctcctcctcctggttcccctccacatccctctccacgtgctcctcctggttcccctccgcatccctctccacgttcccttcctcgttcaaatactggtttggatcctcgttcccctcttcttcgttccagtactggctgcttccctccgcgattgtatcgtacaatatctgttcctcatcgcgatcagccatatgttcatacaggaaactgctgctaagtcatgagacatttatgttttaacaatcttatatgctaacaatcatatatgctaagtcatacatactatgtctcatcgcgatcagccatatgttcatacaggaaactgctgctaagtcatgagacatttatgttttaacaatcttatatgctaacaatcatatatgctaagtcatacatactacgtctaactgtcgtatatgcgaagtcatatatgcttagtctaactatcgtatatgctaagtctaactctcgtatatgctaagtctaattacaaatctaataatcgtatattaaaacaataataatcttatacgaaaactcaaataatcttatactaaaactcaaatagtgatttatgctaagtctaggtgacgtatattataggaccctagctagtcaataattatatactaagtctaattacaaatataataatcttatattaaaactcaaataatcttctactaaaactcaaatagtcatatatgctaagtgtaactgtcgtatattagaaccctacacaatcttatatgctaagtccaattacaaatctaataatcttatactaaaactcaaatagtgatatatgctaagtctaggtgacgtatattataggaccctagctagtcaataattatatactaagtctaattacaaatataataatcttatattaaaactcaaataatcttatactaaaacttaaatagtcatatatgcgtagtctaactgtcgtatattagaaccctactgtcgcgaccgggaaaattgccttttcccgaacgctagtgtattaatccccgtcccaggaaaagccggggtacaccacataaacatgatataaaagacacatctttattatatcaacaatatttacattattataaaggcacttaagacctgacaaacaaaaataaacagcagcggactagcgggcctacggctccatcttcacaggcgctcaactggggtataagccaggactccacctaagacttcttctccaaagcttctcttactgaaggggggggaagattgagcgagaatgagtacaaccacagtactcagcaagtcacaccggcagatgcatgattaatgcaagggagtacaaggggataataatatcggggttaagttttgcagaaaaccgcatttaaaagtcacttagttgctcaaagccatttataaagacgatcctagagctacacaatattattaatcaaggccgtgaaccctcacgaacctgccttaacccaaggcctacgatgattcagaccgaactggcaacccgaccctgggtcccagctcgtcccaagccaacccaggccaaccattccacattttagttgttaagcaaattttaagaattaaaacactgacttgggtacattgctcggcttgcccataaccgagggcgcggctattcgaatagattatactctgatcagaggtgtacatctttacccacaagacacatcttcctcacgtgtaaccacgtgccacataccaccacggtatacggacggaagacgtgacatagttcccaacccatcctagccataaacaagagtaccgacccaaccctacctacggccggaacccccgggacaggcaggcaggattgagccccctagcagcaggacaccagccctgtgccatgacatctcgactaccgggccgcagctcgtgtagccttcatttgtcctagagatgtccatcgacccccgacttcgttcatctccatccgtgtacttttgtttataaccagagtgagccacaaactaagccttacccactagacatgtggaagtacggtagtgctttgcaacagaggcccgagcttaatccttatagtggccggggtgctacttcccacaactggcatgcacccaaaccccaccgaaaaacaggttttaggggctttgaaagaggaagggaggggtatgtccaattccaccataatccaacaattccataatgtccaaatgatatgagatttcccagagtctaaagttataaaaccacctaatgttgcctaattaaccagcgaagcatctacctaagttcacactagtggaaccataaatagagtacccactagttggggttttattttcctagggtgaacaaggtaataataacaatagcaataataatgtcataacaaaggtaaataggcatggctaaataaaacagtgataacgcgggaatttaaataaagcgataatgcattaatttaaattaaaataattttataaactgggattcaatatgctcaaggatgatgtgacttgccttgctcgctttcccaaacgtcggcttcaacttccacgaagagcggatcttccgaagctgcagcgtctacacgtccaacggaaaagaaacggcttttactctaataaactccatataacaagcagaaacaaagcacaaaaatgggttcttgacttcttaaggaaaaattagagacttgaacggtccaattccgagttcaaatggccaagttatggcaatttgaagtttatatgctttttaaatggatatttgcgaatttcttcatttaaattttaatttaaaatagatttattgcgtcagccgggagagaggagcgcgcggaccgggtccacgggagtggggcccacgcggcagcctctcggtccacggtggaccgggtgcacccggctcacaccggccggcgccgtggtcccacgtgtcagccgcacccgagggcgcgggcggctgacggccgggccccacatggcagccgcggggcgcgcccgaaggcggccaggccggcacagccgacgggaggcggcgcacccgcgccccgatggtcgctgccggtgaccaccggcgcggcggagcggcgcccgagagaggggagggaagggggaagcgaaacggcggtccacggctcaccccgggtcgacggcggcgacgggaacggcgaccgaagcggaggaaggcggcgacgcggctcgggtcgacgaggacggcggcgttccggcggtcggcgggcgaaacggaggggtggacgaggtcggcgaggttgcggcgaacccgaagaaggcgacgccgaaacgggaggaggtccggggtgacggcggcggcggaccggagctcggcggcgacggcggagagagagagcgacggcgcgagctcgattccggcggagagagagaacggcgagaggcggaaccggacggagggggtgcggggagggtttaaatagagccggggcgagagagggtggccggggaagggaggaaaccggcgcgggaggtcggccgccatcaatggcgccggcgggattaggggagcggtttccaaccgaatccgagggagagagggagggaaaaatggggggaaagagagagggaatcacggggagtgattttcccctctttattgcgcgcggggacggcgggaggcggcgggattcgcggcggcggcggcgctagggcacgggcgaggcggcgggagcggcgggaggatagggatgacaggtgggccccacccgtcagcgagggtggcgggcgggcccgcccgtcagcggcgcgcacgcggggagaggccgagtgggccgcgaggaggaggagagagagggagggagatgggccgagccggcccaagaggggaaggggggaaaaaaggactttttagggtttttctttttataaaacctttttaactttgtttatttcttaataattattatttgtgctctgaaaattcaagtaaaatttgagggctccttttagaccaaggagaatttaacaaaaattctccgggccgcatttgaatttttcttgtacgtattttagtgtttgccaatttcttttcgaattttaattaattctattattccttttagcgaatgatttttaattcgggatgaatttatcaggacgtgacaaatccaccccccttacaagaatctcgtccccgagattcgaggaggctagcaagaagataggttgggcggtcttctcttcttgtctgacttcttccgctccgtcttctataacaaacttgcctaacaaaacttctccactctggactgcttggctcgatctcctgttgcagatggaatcttctcttcacccgacttgtccctggttgaacctttagctgacttcgactgggttgcggcacttgaagatggtgcttcagttccagaacttcgcatagtccatatttttggcgtcaacctcatggaagttaccacttcatgtcatgcgtcaacactagcttgtcattactaggataccatgtttgtcatcataagaatatcatgcttgtcattcacttctaacttgccaccagctgcctcatattagctttcccggtctccgggtaatagctacttctgctatttgatgcaagggtcgataacgttgcctttgaattatgcttcccaagagaaccaacttatcccacttgacatactttgacgtcttcccaaatggctttattgctggatttcttattgtttgatcgttatcctgccaaatctgaagcttcgttgtctgacctctgtagactatcttcgaacatatcacttggttcataactgggaatagctcccacaaacaagcagctcggattcactttctttacattcagtttatttcccactattatcttcaggttgtccttagttagcattcaacgtattcctttacacctttaaccttgatgtgctctttcccattggatcatctcccaagacatggcattgcctggtaaccggtgcttgcacttttcactccgtgtagcatctgataccgagttaaagatttcattccttgccttcaaagaaacacttttacctaggtcgtcttgcttacttcatgatgcctcaatgaccaggtgactgttgcggggcaattactatcaggggtcttccttgagcgatgcagagcatgtttctgtttatcctttatcaatcacctttcggcctacttctttcctgctagagaacatctttgccaatctcttttatcaatcttctttcggcttatctctaacaggtggtactctttaatgtggattgcggacgcttctggggacgatgaagtcctttggcttgctgcctttcagtgaaaccttgatgtggttcgtcaaaaagctgcactgactaccttcagggaaatacattgcttgctatctgtatctatgccactagggtttaattgccgatgatcctctttagtgcttcctcgagatggggagcatccaaattgttcttctgccatatcacctttgacccttttctgatacctgatagactaattaccaaccatcgactactatgttctcaaatattgatgtcccctggatcttcttaactgtttgtaggtatacccgaacttatcaatgtagaggcatggcgggtacccttatgggtttcatccaacaatccttatcttgatctgtaaaaggcgtatccaaactcctatccccaactactgtctcattggctttttaacccaacacagtttaattggttttcttttccatcaacaggttggttattaactcgaggttagaatatgattcctctgaaatgagaccctaggtctcctttatcagtaaacaattatacacatgatcacatatccgcatcttccaatagaatcctcttaaaacttgtctgtattacacatttctcccttattacacgaatacaaggcactgccttaaacaaaaagggaaggtgcttatcatcggtacattgtatcctcaacatgaatcatccataaacataacaaactcattgtttataatcatgaatgtatttatttattacatgattgctgcaaactcccgattacacaatgataagtagcgaactaaaaaccacaaacgtggctgctcattttgattctggagagatatagctggcattgttctagtgactgcatccttgattggttctgtgatgatgtgttaggactgcatattgctatcattcacaggagaagcttccttctgattgctatttgaagcagagaacggtattctgcttggtatcgccctcctgagattgattgccctttgctcggcctggagtaggtcggggagagacacaacttcttccatcgacaacaattctttgctgaggctgtcggtgcagagaatggttggtgctgaaggtattattgctatgatttattgcagagtcaggtggagcaggaggagcattggtgttgtggatgatattgtcgatgttgctattggagctgactagctgatgagacaaccgtagggttgttcgttggatttctgcggtcttggtcaacaacacactgagttggcaatccttgggcacatggtttgtaccttcgcacagaaaacatgtcaccttgcgggtgggacattcacctggtggatggtcttcctcacaatgagggcagagtgtgagacacatgctagcaacgtgtccaatttctccacaacgggtgcatgcctttgattccatttcttcctcgccgagatgtcggggagactcatcttcatcatccgaggagacttgatctgacccttcactatcagatactctgccaccatggcttaggaggtgctgggtcaactgtcatgcacctcggaaggtatttcctctttgacgtctaggaatagttatccctgctggaggccattcggtgctggtaatagtcatcttacgtacttcttcttcagttcgcatcggtgcttttctcttctgattcttactcttcttgcctttggcttgcttagtacgtgaccccacgtggtacgaaaggctaggaggaaagcaattctcgggattcaatggattctctccattgggctctctactttgcacactaggctgcaagcttgacttggtgcgaggaggctggtttagcgatgcctgccctgctaaaccaaaggaaggagcttctttggcatatacccatggacaattcagggcatagtgtccttgctctctacaatcgtgacaaaaggggacatcctcttctggcattggaagctcatcgacctgggtggcaaatgctcgatcaaacacatactgattttggtcttgacttccaaccaatggtagctgtgaaccaagcagcatgctcggaatggaccaagggtgtgccctggttaactctcttgaggccagtggtggattgagttgaaaacttgagttacttgaggcatacccgctgacattctttcctttttctctgttaaacatctgttacagggattgaggtgagagaggaaacaagccaggaaagaatagaccagaactagagataggaccttaaaggaactaactcttcttgttgatgtgttgtttgtttcacttattctgcaagttgattaagcaaacaacctagcatggttacatcacaacccaccgatgcaaaccacgcgctacacacacaagcaaaggagcacacgactaacgactctaccctagagggtggcttaggttctgcgacgggttctccaagatcttcactccggcttcacagctggcttcactgcttccctcacttcactagcggatcctgcagccttctggagcttcggcagacaattgacgacatcttcttctttgcaaaactaaccatctagtactagtggaaaatccgaaggaggaagaaaagagaataaacattttgcaaatagcacaggggaaaggaggaaaaagggactttcgcaaatagtttcatttataaaatatgtccttaggttttatccatttggcttatcctacagtcgagatggctctgataccagcttgtcgcgaccgggaaaattgccttttcccgaacgctagtgtattaatccccgtcccaggaaaagccggggtacaccacacaaacatgatataaaagacacatctttattatatcaataatatttacattattacaaaggcacataagacctgacaaacaaaaataaacagcagcggactagcgggcctacggctccatcttcacaggcgctcaactggggtataagccaggactccacctaagacttcttctccaaagcttctctaactgaagggggggaaagattgagcaagaatgagtacaaccacagtactcagcaagtcacaccggcagatgcatgattaatgcaagggagtacaaggggataataatatcggggttaagttttgcagaaaaccgcatttaaaagtcacttagttgctcaaagccatttataaagacgatcctagagctacacaatattattaatcaaggccgtgaaccctcacgaacctgccttaacccaaggcctacgatgattcagaccgaactggcaacccgaccctgggtcccagctcgtcccaagccaacccaggccaaccattccacattttagttgttaagcaaattttaagaattaaaacactgacttgggtacattgctcggcttgcccataaccgagggcgcggctattcgaatagattatactctgatcagaggtgtacatctttacccacaagacacatcttcctcacgtgtaaccacgtgccacataccaccacggtatacggacggaagacgtgacatagttcccaacccatcctagccataaacaagagtaccgacccaaccctacctacggccggaacccccgggacaggcaggcaggattgagccccctagcagcaggacaccagccctgtgccatgacatctcgactaccgggccgcagctcgtgtagccttcatttgtcctagagatgtccatcgacccccgacttcgtccatctccatccgtgtacttttgtttataaccagagtgagccacaaactaagccttacccactagacatgtggaagtacgatagtgctttgcaacagaggcccgagcttaatccttatagtggccggggtgctacttcccacaactggcatgcacccaaaccccaccgaaaaacaggttttaggggctttgaaagaggaagggaggggtatgtccaattccaccataatccaacaattccataatgtccaaatgatatgagatttcccagagtctaaagttataaaaccacctaatgttgcctaattaaccagcgaaacatctacctaagttcacactagtggaaccataaatagagtacccactagttggggttttattttcctagggtgaacaaggtaataataacaatagcaataataatgtcataacaaaggtaaataggcatggctaaataaaacagtgataacgcgggaatttaaataaagcgataatgcattaatttaaattaaaataattttataaactgggattcaatatgctcaaggatgatgtgacttgccttgctcgctttcccaaacgtcggcttcaacttccacgaagagcggatcttccgaagctgcagcgtctacacgaccaacggaaaagaaacggcttttactctaataaactccatataacaagcagaaacaaagcacaaaaatgggttcttgacttcttaaggaaaaattagagacttgaacggtccaattccgagttcaaatggccaagttatggccatttgaagtttatatgctctttaaatggatatttgcgaatttcttcatttaaattttaatttaaaatagatttattgcgtcagccgggagagaggagcgcgcggaccgggtccacgggagtggggcccacgcggcagcctctcggtccacggtggaccgggtgcacccggctcacaccggccggcgccgtgggtcccacgcgtcagccgcacccgagggcgcgggcggctgacggccgggccccacatggcagccgcggggcgcgcccgaaggcggccacgccggcacagccgacgggaggcggcgcacccgcgccccgatggtcgccgccggtgaccaccggcgcggcggagcggcgcccgagagaggggagggaagggggaagcgaaacggcggtccacggctcaccccgggtcgacggcggcgacgggaacggcgaccggagcggaggaaggcggcggcgcggcttgggtcgacgaggacggcggcgttccggcggtcggcgggcgaaacggaggggtggacgaggtcggcgaggttgcggcgaacccgaagaaggcgacgccgaaacgggaggaggtccggggcgacgacggcggcggaccggagctcggcggcgacggcggagagagagagcgacggcgcgagctcgattccggcggagagagagagcggcgagaggcggaaccggacggagggggtgcggggagggtttaaatagagccggggcgagagagggtggccggggaagggaggaaaccggcgcgggaggtcggccgccatcaatggcgccggcgggattaggggagcggtttccaaccgaatccgagggagagagggagggaaaaatggggggaaagagagagggaatcatggggagtgatttccccctctttattgcgcgcggggacggcgggaggcggcgggattcgcggcggcggcggcgctagggcacgggcgaggcggcgggagcggcgggaggatagggatgacaggtgggccccacccgtcagcgagggtggcgggcgggcccgcccgtcagcggcgcgcgcgcggggagaggccgagtgggccgcggggaggaggagagagagggagggagatgggccgagccggcccaagaggggaaggggggaaaaaggactttttagggtttttctttttataaaacctttttaactttgtttatttcttaataattattatttgtgctctgaaaattcaagtaaaatttgagggctccttttagaccaaggagaatttaacaaaaattctccgggccgcatttgaatttttcttgtacgtattttagtgtttgccaatttcttttcgaattttaattaattctattattccttttagcgaatgatttttaattcgggatgaatttatcaggacgtgacacctacacaatcttacatgctaagtctagttacaaatctaataatcttatattaaaactataataatcttatattaaaactaagtctaagtgtcgtatattaaatctaatagtcttaattgcattacaaatataacaatcatatatataattacgtcacttgcctgcgcgaattccttcgagggctagctaccactccggcttgagggacgacgacgacaacgtcttttctgcaacatacaaaaagatgtattgggataaacgcgaagtaacatatattatatttgacgttcacgtttcgttcacgatcgttcacgttcgcgttctcgttaaggtcacgtttcattcacctacgttcgttcgttcacgttcactcacctacatatattgcatttcacgttcacgttcgttcatgttcacgttcacgttcgttgacgttcgttcacgctcgttcgttcacgttcgttcgttctttcacattcaattctcgttcacgttcgttcgctcgttcatgttctcgttcatgttcgttcgctcgttctcgttcacgttcgttcgctcgttcacgttctcgttcgttcgctcgttcacgttcgttcacgttcacgttcacgttaattcgttcgatcacgtggcggcagcggagcggcggtggggcggcgcggcggtggcatggcggcggcgtgcggcgcgcggcacgcggcccggcggcggcgttgtgcggtggcggtgtggcggcgcggcggtgccgtgccacggcggcgtcgtggcgtcccggcgtgtcgtgccgccgcagcgtcctggcgtggcgtcgtgtcgtgacgacgtcggcgtcggcgtcggcaacgaggcggccggcggcaaccgagagggagagagagatcgagatcggagagagagagctgagagggaggcggcggcgtggctctcaccccagagatgcggcggcggcggaggaggcggaggcggcgacgacgacgagcgcgagacgacggcgagatacgacggcagcgtcggcgtggggatgccctaggcagtggcggcgaaggagaagccgagagagatcgatcgggcaaaaacttctaagtgttggtggagaagacgaggtcacgcatcgggaatatatatacccctagatctttagtcccccggttgatgagaacaaccaggagtaaagatatctttactcccggttgttctcatcaatcgggactaaagatattttcccgctatttcgaaattctttttaaacccggttagggttaagaactgggactactaataagcgcactgaatattaatttccattacatatgtgtttctaaaatagaaaataatgcattaaaattatttaatgtagaaaaattaatgataattacttcgaaaaattattgttgtatgtaataaattaagtggataaaacgtaataaacaaatataagatttaaaattaataaaaattctaataatcatatatacttagcatatgaatgatattaaattgttaaaaactctaattaacatatgtatatacatacgccatgcatgatttaaaattaataaaaattgtaataatcatatataattagcatatgaatgatattaaattaattgttaaaaactctaattaacatatgtaaatgccacatgcatgatttaaaatttttaaaaattcgaatagtcatatataattagcatatgaatgatagtaattaattgttaaaaactctaattaacatatgaaaatgccacctgcgtgatttaaaacttttaaaaattgtaattatcgcatataactagcagcatatacatgatttaaaattgttaaaacctctaataatcgtgcgtaattaacatatgccatacaacaattgatttatatggataatcaatacatccaaaatagtttacatcgtgtacacaataattacggcaatacatcggcggtgacggttgaccgcacgtactttctcctcactattgttccctccttgtgatcgctacgtgagtaaggggtatcttcatttgataggaggatgctagggtcaatcgtcaccgtgaaagggggttgcccatccaactgatcgtaatcctctcagtcttgtcctcaactccgacgatttttcttttgcctgggagaaccacgtgacgcttaggctcgtcaggccctctgcccttctttcctttgctagacatgtccttcacgtgaaagacttgcgttacatcattagcaaggacaaaaggttcgtctgagtatccaaccttgttaaggtcaaccgttgtcatcccactgtcatcaatcattacgccttcaccagtcaacctaacccattggcaccggaacagagggaccttgagaggaccatagtcaagttcccatatgtcctcgatggcaccgtaatacgtgccagttgttccatcgtgtcccatggcatcgacacgaacagcgctattttggttcgtgctctttatgtcttgggctctcgtgtagaatgtgtacccattgatctcatatccctggaatgtcgcgatcgacccagacgatcccctcgccaggaaggcaagttgttggttgatcgactcgttacccatgagatgttgtcgtagccacacgggaaaagtatcaatgtgatgccgtataatccatgcatcggacttaccgatgttcctggcgggaactagagcaagtgcttctcaatgtaaggagctaccaatgaagattgttgcagaaccgtgaaatgggctttacggaataaattgttgtctaccgtcattattgctttccttccgagagttccctttccccgtagtctcccttcatggcgtgattcaggtaccccgattgggcgaaggtcttcaataaattctacgcaaaattcgatgacctcctctgtttgtcctcgtcccacacggggacaccttccttcttccacaacagtttaacatcttcgaccagtggtcttaggtacacatcgatgtcgttaccaggttgcttggggccttgaataataatcggcatcattatgtacttcctcttcatgcatagccaggggggaggttgtagatacacatcgtaacggaccaagtgctatggccgctgctcatctctccaaaaggattcatgccatccgtactcaaaccaaaccgtatgtttcgtgtgtcctttccaaagtctttaaattttctgtcgatgtttcgccactgcgaaccatcggcagggtgtctcagcattccgtcctgttgacgctcttcagcgtgccatcgcatcattctagcattccccttgttcttgaacaaatgccttagccgtggtattatagggaaataccacatcaccttagcaggaattctcttctttgttagctgcccgtcaacttctcctagattgtctcgtctaatcttgtattgtagtgctttgcaaacagggcaagcttctagtttctcgtactcctcactgcgatataggatacaatcattcggacatgcgtgaatcttctgaacttccagtcctagagggcagactatcttcttagcctcgtacgttgtctcgggcaatttgtttccctccggaagaatgttcttgacgagtttcaataaatcgccaaatgccttttcactaaccccattttttgccttccattgcaagaactccagagtggtatccaactttttgtgcccctactcgcaacctgggtacaacgacgttctgtggtcctctaacatcttgtccaatttatgggcccccttttcactttcgcagtcctccttggcgtcctgcaacatctgaccaagattatccgcaacgttattaccatcagcatccctttcctcctcgcccgtttgatttccttcaaatccaacgtattgagcaaagtccggaatattgtcatcttccacttcatcttcttccatttcaacaccttactctccgtgggatgtctaacaattatagcttggcatgaaccccgactcaaacaagtggaaatgaatagtcctggatgcagaatactccttctgattcttacacttattgcatggacaacaaataaaacccttttgcctgttagcttcggccactctcaaaaaataatgcacgccgtcaataaactctttggaccgccggtcagcgtacatccattgccgatccatctacatgacatgaaaaaaaatcgtacacaaataattattcttacaataatgacagtcatacaataattataagataattacaaactctttcaagagtcatacaataatgacatatctttatttatacaaaaatcataaaatattacaccaaataattcttatttactatttctaaagttttaaactaatattaatgtgttttacttcttttaattttcattttagtttgttttctattatttaagattaactttcactatattttccttctcaactattttataaaaccttctttagcaaatcaactaaatttctatatattctttcttccccacacaaattttctctctcatcaactgacaactaaattttggagacaaaaaagtgtgcaaaacatagctccaaatgtaatatgacaaaaaaaacattggaggatgaagttgcaaaccttttaggcacctccgatttgtatgtaatcaccaaaataaattcactataaattttggcatgacctcccctcttttttgaagaaattttgaagcttgctcaggcagctggaggaggaagaagacatatatgtagcagtgggactttagtcccggttggtgttaccaaccggggctaaagatccccgagatcttagtcctggttggtgttaccaaccgggactaaagatcccgggggggcctgacagaccctgacagcatttgaaccgggactaaagatcaaatatgcccgttaccctttttaaccgggactaaagatcatccttagccccggtttttattgcatccgggactattgtggaatttggccgaccgacgaaagatagtttctccaccagtgtaggcgctttttcccatcgataaagctggattaattaggagatctcgaatatctttttgttagtatataaaaatgcatgtgatgtggggttggtgcaagataaaagtgaaagtaacttatcgacgtgttatatcttaattttcaatcaaagccggatatgatgtggagtggtgggaacttggaacagtgacgcccagtgttatatatttataaaaagtatatgtgaatgaggctagctgctgcttgttaattactcccttcgtttcaaaatatttgacaccgttgactttttagcgtatgtttgatcattcgtcttattaaaaaaatttgtgaaatgtgtaaactatatgtgtacatgaaagtatatttaacaatgaatcaaatgatatgaaaagaataaataattgcttaaattttttgaataagacgaatggtcaaacatgtactaaaaagtcaatggtgtcaaacattttgaaatggagggagtaacatatatagatgattgatcgatgaaacaatcgcattgggggctccatgcatgaaacaatcgatcgatttggggcccggacatcaacttttggtgccctttcctgagcgaatccatgcatccatacctacactacaacaaatataccttatagagacattttcctaatgctatagagatatttttaaaatgcctttatagtgttatagagacattttgaagagtgtctcataagtgccttttggtgatttgtctctacaaactaagaggcattttataagatgtctctatgcaaatagaggcattttgtagaggcattaattaatatgttgcggcaactgtagcaaatcaatatgaaaaaaaaaagacattttgaagagtgtctcataagtgccttttgacgatttgtctctacgaactaagaggcgttttataagatgtctttatgcaaatagaggcattttgtagaggcattaattaatatgttgcggcaactatagcaaatcaatatgaaaaaaaaaagaaaaatagtatcccttaccaatccttgaactcatgaactcttgagtagaccatttttatcttcaatgcagtaaccatctcaacctcatataattacatgtaaatatgtgatttgtgttacttatatctagttacttgatatatattaatatttggaaaaatgcctttacatcgttttaaatgccttaagaaatgcctttacatatgaggcaaattttaaactgccgaaaagatgtctctacaagataaatttaacaaagtatgctaaaaatgtctctaaagtgtctctagagtcaaaatattttaggcaattttgaaagtgcctctaaaaagtgtctttagactatagaactttaaaacttagaggtattttaaaaattgtctctacaaaagagcccctacataaggtttttgttgcagtgctaacgaagaccaaacgattgaacaccatgacgacaacgatggttgatgaatgatgacgtttttgagatgatgaataatgactagtctggagatgcacttgatagtgtagtgacaaaagatacactactggagaagtgatctttagagggtcaggcgatttccacattagtcccagttccaaaaagaaccgggactaaagtggtttattagtcccggttcttaacttcaacgggacaaagggatctttagtcccggttggtaatacccggttcagcccctaacagggcatgtcagtcccctgtcggggggctggggaactttagtcccagttggtattaccaaccgggactaaagatcgtctctttagtcccggttagggataccaaccgggactaaagttgcacgactttatataccccttcttccatctccagcccgagccattgcttcaaaattaagctttgaggagggaggtgctaccaaaattttaatcgaatttttttggtgttaatataaaaatctgaggtctccaaaaggttagcaacttcatcctcctatattttttgcttagcatttacattgagacccttttttttacacatttttccctctaggaaatttgatagaagttgatgagagagaaagtgtgtgtagggaataaaaaatatatgccatatgtttatttagacttttataaatagtggtttgaataattacatatatttttgtatgaatggttaattatgaaactaagttaatttaaaattaaaataataacaacatattgaatatttgtttacaatgtaattaaaacataaataatatgtataatggatttaataaaaatgattgtatcaataattatattcagttattgtatgattatttatttagttcgtcaatcttggattttttatatttacgatttatatgcatttcatgtagatggatcggcaatggatgtacgtggactggcggtcgaaagaatttattgacggcgtgcattattttttgggtgtggccaatgataacaagcgtaacagttttataagctgtccatgcaacaagtgcaaaaaccagaaggagtattccaccgcacgaactattcatgcccacctgtttcagtgggggttcatgtgtagcgacaattgttggacctcgcacggagaagttggggttgcaatggaagaagatgaagtagaagatgataacattccggactgggcttggtatggcagatttgaagaaaacacaatgggcgaggaggagctggatgttgaaggtaatgaaggtgctgatgaacttggtcaaatattgcgggacgtacaggaggactgcgaaagtgaaaaggaggtgcagaaactggagcacatgttagcggaccacataacagcgttgtacccaggttgcgagcagggccacaaaaagttgggtaccatcctagaattctagcaatggaagactaaaaatggtgtgagtgacaaggcatacggcgagttattgaaactcgtaaagaacattcttccggaggggaatgaattgcccgaaagtatgtacgaatctaagaaggcggtctgccctctagatttggaagtacagaagatacacgcgtgtccgaacgattgtatcctgtatcgcggtgaggagtgcgaaaacctggaagcatgccctgtttgcaaagcactacaatacaagataagacgagatgatccaggtaaagttgacggatagcctttgaagaagagaattcctgctaaggtgatgtggtatttccctatataataccaaggctgaagcggtatttcaggaacaaatcacatgctagaatgatgtggtggcacgcagaagaacgtaaacaagacgggatgctaagacaccccgctgacgggtcgcagtggcgaaatatcgacagaacatttaaagacttcggcgaggatgcacaaaacgtgaggttcggtttaagcatggatggaatgaatccgtttggagagatgagtagtggccatagcgcctggcaggtcaccatgtgcatctacaatctgcccccttggctatgcttgaagcggaagtaaatcatgatgccgattattattctaggcccgaagcaacctggtaacgccattgatgtgtacctaagaccattggtagaagatctaaaagtgttgtggaggaaagatggcgtccccgtgtaggatgaggacaagcagaagcaatttaacctacgagcgttgctgttcgttactattaacgattggcctgcacttagtaacctatccggatagtcaaacaaggggtacaagcttgcactcactgtatggatgaaactgaaagtacgtatctgaagcattgcaggaaggttgtttacatgggccatcgtcgattccttgctgcaaaccaccctgtacggaaaaatagcaagcacttcgaacagaaggcaaaccatcgtactaagcctaaacatcgcaacgggaaagcagtgttcgaaatggtgaaggatctaaaagtagtatttggaaaggggcctggcagccaacccatagagagtgaagatggtcacgtggcgatgtggaagaactcttttttttgggagctactgtattgggaggtcttggacgtccgccacgcaattgacgtgatgcacctcactaagaacctttgcgtaaacctgctgggcttctagggtgtatatggtaagtccaaagatacacttgaagcacgcaatgatctgaagcatatggaacaacgcgagggccttcatccggaaccgaatgagaaaggaagccattacttgagcccggcgagctacaccctgagcaaggaagagaaggagagtatgtttcaatgcctagagagcatcaaggtaccatccggatactcctcgaatgtaaagagaataataagcacgaaggataagaagttcacaaatctaaagtctcatgactgtcacgtgcttatgacacagctgcttcctgttataattcgtggtatccttcctgataatgtccgggtaacaataaagaagctttatgctttcatgaacacaatttcacagaaagtcatcgatcctgaaagtttagccacccttcagtagtacgtggtgcaatgccttgtcagctttgagttgatctttccaccgtcattcttcaatataatgacgcatcttctatgccaccttgtgaaagagatcggtattctcggtcctgtgtacctacataacatgtttcctttcgagaggtacatgggtgttctaaagaagtacgttcgtaaccgttctcgtccggaagcaagtatcgcgaaggggtatggaacatagaatgtcattgagttctgcgtagattttattgaagacctccagccaatcggggtacccgaatcaatccatgaggggagacaacggggaaagggcacactaggaaggagagcaattatgactgtagacaacgatttattccataaagcacatttcacggttttgtaacaatcttcgttggtttctccttacatcgaggagcacctggcgattgttctctcagaaaacattggcaagtccgatgcctggattgcacgccatcatattgatactttacccgcttggctgcgagaacacctcatggtaacgacacgattgaccgacaactagccttcttggctagggaaccctctggctcggtaactacattctaaggttatgaaatcaatggatccacattttacacaagagcctaagacaaaaagagcacgaaccagaacagtggtgttcgtatcgatgccataggacacgatggtccaactaacacgtataacggtgtcatcgacaacatatgggaactagagtatggacccctgaaggtccctctgtttcggtgccaatgggttaggctgactggtggaggcgtaacgattgatgacagcgggatgacaacggttgacctaaacaaggttggatactcagatgaaccattcgttctagccaatgatgtaacgcaagttttttacgtgaaggacatggctagcaaaccaaagaaggggaaagggcccgatgagccaagacgccacgttgttctcctaggcaagagaaaaatcgttggagtcgaggacaagactggcgaaaattacgatctgtttgaggggcaacctccgttcgcagtgacggttgacccgagcatcgtactatcaaaggaggacacgtcgtactcacgcaacgatcataacgaaggaacaatagtgaggagaaagtacgtgaggaagacagtgacataggttgtttgatggaagatgtaaattatttgtattgcattgaaggtcgaacaatttggatcaatttgtaatatattattctcgactgcttaatttttaatgtattatgatttttcaaccatttaaatagttcatatgatatttataaataattacttctatttatttacaatttgaatacaattaaataggccatagcttaattataaatgattacttctatttatttacactttgaatacaattaattaggccatagcttaattataaatgattacttctatttatttacactttgaatacatataattaggccatagcttaagtataaatgataatttctatttatttacactttcaatagaattaaattggccttatgttaattataaatgattttttctatttatttatactttgaaagcatttaaataggccttatgttaaatacatacgattattggtatttatttggactttgaaaacatttaattcggccatatgttaattatattggatttattggtatttatttgaacttgtaaacaatttaaataagccataacttgattttgtgtaaacatctttagtccaggttattaatagtagctgtgaccaatataaatttggtaatagctggaaaatatctttagtcccggttcgtggctccaaccgggactaaagatatatctttagtcccggttggagccacgaaccgggactaaagatccccggctataaatagccactgcatcggcttccccgcgccacacttagacacttctctcccacaatattcttcctcgtgcgccatcaccgcccgagacgccgccggccgctgccaccgccgtcgtcgtcgtcttgctcgccgcgctcagccgccctcgccaacgccactggcagcgtcgcctccctcaaggtgaatcttgcacctccgatctctccatctctctcttcacgtcaatctctctctctctctctcgatcttgatgacgctggccgaccggacttcgccgccatcgccatcgccgccaccaccgctgccacctccgccgccgcctcgcaccgcacccgccgccgcgcgccaactccaccgccgccacctcgctgacgccaacgccaccgccgccacctcgccgcgcgccgactccaccgccaccgcctcgcgctgactccaccgacctgcacaacaccgccgccgcacaaacgaacgagaacgacgatgttttagcgagaacatttgaacgaaaacataaacggtcgaacgtttgaacaagaacgttttagctagcaaacgagaacgttttagcgaacgagaactattaacaaacgagaatgacgacttagcaactttcacgaacgacttagcgactttcacgaacgacgacttagcgacttagcgagaacgacgacttagcgacttagcgactttcaccaatgacgacttagcgacttagcgactttcacgaacgacgaaatgagatcaacgacttagcgacttaacgagcacgatgacttagcgaattatacatgtatatttgtagggtttagacatatgacctttatatgtcgattgtattccaatttcgatgtacatgacctcactatctttttttctttgcacacacagatggcagaccgcgatgacgaacaaatcctgttagacgcgatcgtagagggcagcaatcagtactgggtggatgaggaggggaacgaggatcccaaccaatacctgaataaggagggccacgaagagggtaaccaggaggctaaccagaaggggactgatagccaaccgtcggccggacagaacagcccacgcgggaaaagaggtcccgcgaagaagctggagggaaggcacattattactgagattgccccagacagcgaaccagtagccccggcaggtataggccgaaagtttgtgaatcatagcgattgggtcgtgagagacaacgtccccatcagcataatgtactggcgtcgaacaaggtcccgcggggatgaagatagttttctccctgacacagagaaagatatgctgtggacaaccatgctagagacattcacgatccatgaggcaaatcgtccaagatgcaaagaatggaccctcaagaaaatgtcagaactgttccaaagctacaaatctgatttgtacaagagatacatcgtcaagggcttgacacctgatttcaaacagcataagaagctaagggatcactgggatgtgtttgtggcctataagactggagcgcaagggcaagcacaaatagaaaagaacaaagccaatgcagctaggacgaaataccatcaccggctagggtcaggcagatatggaaaggcaatccccaagtgggacaaattggaagccgacttgataccacggggtaccgagccggcaatggctaaatggcctgagcgatcaaggaactggttctatgcacatggtggatctctcaatccagttgatggcttcctcatattcggcgatgagatccgagaagtagcccaccaacttcaggatgcagttgaagcctctatgcaagggactttcaggccagacagagagagaaggacgagctcacccatgcactacagaatcctgagcagccaggacgaacgcggggcaaaggcatcgttccttggaaatatggattcaaagtggacatccacacgtataggagtcggattaggagcaatagggataccgaggctaagatcgttgatcttgagtacagggtgtccacctacgaggcaaggatgcaagaggaggttacgagacaggtggaccaacgcttggccaagtagagcgaaatggaaacacaggcgcccgtcatggtgagcccctcaggcaaccgcagcagctgcgcatcaacgggccatgttggatctgagggcattgaggccgtggcagctaacgaagcaacccacttccccgttgatgagatcacacagtggacaccctgcaatatgcatactcccttcaggaattgtctatcaaggtatgcgagatatatatttataaactgcgaaaatttttacatgtaaatgttgattactaattaatgaactcgatgtcttaggtggcgtcgggcatggccatacccacggacccttcgggtacataccattgcaggcccattccacctggatacgcgaaggtagagatagagctggtggaatgaacatacaaggatctcgagcttgacatccccggaggtgacggggagacgaaacttggagacacagcccaagccatcatactctggcggaagaagtacatcgtgtttcccgggcaagaaggttcgtccgctcctccttccccaccgcaagcaccgtctcctccacctcctcagtctcctttggctccttcggctacaccgtcacctcccgctcctccgccttcaccacctcctccatgtgtacctgctgccaagtctgcaccgtcgggtccgcgggaaacgactcctcggcctgcactagctaccaagtctacaccgtcaaggtcccgcccgtatgagcccatgctgtcaagaccgaagaagaaagccaaatctgacgagccaaggctccccgctctcaagaaaagggcgtatgacttgactccgaaggagctcgatgaagccgttagagcggaagttagggagcagttgaagccacagagtccggaaaagaagatccctatacccccggcggttcaagatcactttattaagatggccgaaccgagcaaacaggtcgtagtttctgactacgatcgaacattgaggaaggctcttaaagccaagccagtagcagtgaagtgtagaaaggaagtccctcagctggggtagcaaccacaacaagaggttgaaccgttcgtaaatccagaacaacttgagatacgcaagttcttgagagaaactagactaaggatggagcagttgctaaaggacacacctatcgaaatggctccagtgaagtacatgtttaaactcggtgaaccgctagtcacggctgataagataagagagctacctacacagatgtaccggtttcatcaatggtacttggacaaatcagggatgggtagagagatgttcggagcgagggtgcgaaactcaatttattaccaaggagatgatgttctttggatccattacaaagatgtctttgacttatatataccaccgagacgccctcgacgtctctcttctcagcacgtggactttgtaagtattgtttattgcttcatcctttgaatgtagctcatacaaattccttttatgcttttgtagaatggagattcagttgtgccattagcacaacaaattcaatacaggattcatggacccccacaaagtgaacacgctgatgctgcaaaactacgagaaacaaaccgaggacaatatcctccatttcctagtgcagcagcattataagacgttcatactacttccctacaacacatcgtgagttcctacaatcataacttcaattatgttccttcctataaatatatatcatctaatgcaaattgcagattccactgggtccttcttcttttcgaccttgagagatccaaaatccatgtctacgattcaatggataaaccagagaaaactttcgcacatattttcgaagtgatagataggtattatcatatattgcactgtcattatgaataattctacaagtactatacggatctcggataataaattaatccttcctaacatgtaaatagggcatggattcggttccgtacattggtccgcgggatttggaatgaaaaactcacccggatgttcaattttccggttagtacatgctccaatattatattgaatacttctttgttctaaatcagatatgcatatttaatctctcgttgtttctcttttagtgtgcaaagcaagaacaagggactaacttgtgcggctactacgtctaccattacatgcactgtttagcacaccaaatcaggactggccaggacctcgaagtacgtaaaattattcatccgtcaatgattatttactggtttcatatatataatcctatttttttccaaatgacagatgatttacatgatagatagcctcacccacgatgatttcataagggctgttcaagaacagatgatgggattcatcaatgagcagattatcgatcccacaggagaattctattacgatggaaagcctattcatcaaaccggtccttcttcttccgatgccacgaagtcgtagtaacagaaacaaagattacaaagtccgaaggaattgtactgcatgtatatatttatatatgcacacatgcatttacttttgtgtacttgttttggtaatatatgtgtatatttacttacttgcaaactcatattttgttaatatttgcatatggcctctaattacttaagtgcataatatttgtatatacatatgtatttctacatatgtatatattgacatttcatatatatgtgtacatatgtatttcatatatatacacacacacatacacacacactgatatatatatatatatatattacacataagcataagattagaccgccgttgttgcccacatccacctggacagccaccctcgtccacgtctgttgcggctgccatgcataatctcccgcatccgccaggccgctgcccttccccgtcacttgcgtcctccaggccactgaccatgcagctgccgccttcgcttgttgcaaccgccctcacacacacctgccaaatcatcgccctcgcctcatgcatctgtcaccgtccgcgtctgccaggccaccaccttcgacccttgcatccaccacgtctgtcgttgtcgtctatcacgttggcatcgaataaaataagagatggtaatgaaaagaaggaagaaagagaagagatgggatgcagaaagagaatagatgggagaagatggtggggcctatgaaggtaatagaatatttgtgttacagtaaacataagatatgtttgttatacatattggcaataatgtttcatgtagatgacatggtcatccattgcaattagtagtgggctctcttatttatcttgctctattcaaatggttcataagtaaggtaacaaccgaaaagatacatatgggtcaagtattgatttagatattgggtagaaagttagatttataggtaatttgtccttgggttttgccggcagcattttcacaggccgtcgtaggcagccaccagtgataatacatattattggttgtggttgtttaacgctaaccagctacgaaaatgatgtcattatcataagcagatgtcctaactagcccctacgggagcattttcacatgtggctacataataccgagcttgttataatgtcacccacaatttattcctgcccgagccagctcatttccatcccgagttctctctattgtaaaagtaaaaaaataggggggatttttaacttgaattctttggtggatcttggctatgtaaagttagattcttcatatcctacaatgttttcaaagtttgctttcaaatttatgcattcaatgcggataattttgttgaattatctatgctatctaagcttctttagttagagctagaatttttaatttgcatattggagctcaaattggaccaaattttcaaggcaatctttgtgcaatgttacggtatcacatacacctaggtgggctggtgctcctttttaactcaatcggaaacgccccaaaatgtttggaaactagccgtgccccccgcgcgatgcgccgacatcatccaagataatcttaatcataaaagaaaaatcataataataaaaaataagcatgattgaaaacaacatagcacataacagagctacacaataataataataataactcgatcagaaagaaaatatcacgatgttctcaattttgagtgatttaattggaccataatattttttatataatcaatgttacacgaacaacgggtatctcggtgcataatacaattacatcaacaaaaataaaataaacaacattagtatttcaatacctagcagagtagcagttcccaggaagaccaatcagtgggcgatgattaatttggaaggatagtcaaacaaaactatgtccacagcacatcacagttgtgccccctgcgcattgcgcgggcatatgaggcaacctataataactcaagatcagaattgggcatatcacaagataacatgcaacactgttccacagtaatagcgcaatatcaaaaagggcatataatctaacaatgttctcagttttgaagtgatgtaatcaaaccaaaagtttttttaagagcaatcttacactaacaaacatggatctcggtacatagtagacaacattcttaattcgataccagcagatcctaggaaaaacgaatccttgggcgatgattaatttggaaggacaacggacatcacatcatagatatggcagtggcaactcatattgtatatgttttacaatctatacaaattggccattagcaataacaaatagaaattaaggtttactgctccatgacccagaaccagtgattttatagccaattctggagatatgagagttcagtattctcgccagcttgtcattaattagcatcgatctattttagccaccaataagaaaaggaaaatacatccacattttaaccttgatgaagagcatgcatatcccacactgtacaaacaacaaagcataatttcaacagaataaaacagtttctaatttcctaaagcatgctgagtaatatagcatcagtatataatagcatgagaaagttgaaattacccggactggcggtcacaaaagcatcagtggaagcctgtaggaagccataaacccatgagctatataaaatacgcaacaaaccactaaaatgccatcacaatattcagttatcgtgttagctaaggtccaatgtttgcctcatattgtggtctctgccatgcgcccatgcctgaaaacgaaaatggatgaaagtggtcactgagatgctgccaaatataaatattgacccatgcaaaaatatatgctacagtttagccgaataccggtttatatgataaaaaatagagtagggaaggtcgtttatcaaaacaactaattaaataatgatcatgcatagggatataacaattggacaacaaataagacttcccaaggaactacccaaaaaactgaaataataccaggcaataacaggtagagaaaccctaaagagcaattgccaagtagctggaagccttgaacttgaaatatgaaaagcataggaattagcaaacgaagccactcaaagaagcaagtacactattagaaaataaaaaaagataaatgaaacgaaatatgcccatgtgttgttgtggatgattgaaaaattgtatagatatatttgagataggatgatggcacataaatatgtagctaggtatttaaacaaaaggagagggaaactgtgttgcatatatctgttttagtagtaactgagctactcatcatatagtattgggatcacatgtaccaaaacaaaataaagttacatacctgaggcaaggaaaatagaatatgcatttaagcgtatggcaggatgatatgaaaaatagcttttaagcaatactacactacaacaggaagcaagtggatttgacaaactttggtagagataggacagtactcttcatcaactttacattgaaatcatccatgcatttcttgggcatagaacaatggccatgtaaattatcaatggtagagtaaaggatggtgaaataaattaattggacaacataatgataaaaggggatcagggagctgacgaaccactgtcctggattaaaatgaagatatgcaaggaaaataaataaaatattcattagatattgatgccagacattaatattgttttggcagtgagaagtggccaaacggcaacaatcggaggacttctttttattgaaaaatcgtatgacttctggctggatgggcctagcccaaacctgaatcaagattagggcctaatccagatagaaaataatggggagatcatacctcactgtcccaaggaaggtgacggcagcacaatggctagaagaacacttgctccactccatagcttgtacccaaaccctaactgactcacaagatatgtcatccaaattgacgctgcaaaggatagaagcaaggatgctgaagatggagaagcagattgagttagggcttggcttgctctgctctactccatacccataccctaactacagatagattcatcacaaaataagtcatccaaattgatcactgcaaaggataaaagcaaggttgctgaagataagaagcagatcaggctagggcttggcttaccagactgcacatgttgtcaacaccgtgcaaagaggtggacgaaggcaactatggcagcgggcgtgcacccttcgtccaccttgagaaattggccggtcgagcaagcgaatcaagcggaacggtggcggcgcttgcaggtggctcgcaagaaggcgacgaccccggccgctagctccgcaagaaggtggcggcggcgggcttcgcgactcgcgaggggaagatgaagatttgagtattttgggaagggaggcgcagaggatgtcgaggatcgaggggattggggaagctatgccgggcgcagcgatgtgcatgtgaggcgtggacggttggatcaaatcaacgcgtggacatcggacggtgcatgctgggtgatgaactgtagtactgtagcatcttttcctgggctgatgctgatcaaatcactgctagtagtgggttgtaaaaactaaggatttaatatgatgtccatgcatgtttacgaccttacctgcaaaacatgctaaacccacaaaactcatgcaaatttattagtctaaactaaaatggtgtaaatgaactaggaaatcactagtttattcacatatgtttggtagtcgaaatggtatttaacaacagccaacacatgtcataggggagaataatatgaaaggctaatatatgtactgtttaattgtactttccatgtgcacttgatctgcaatgtgagtgagatttgggtgaatatgatatttatatgaagtagttatcaatttaccccttattgtctcaaaattaatcactaacatgtgagcacaatgatcacgggaagaactcacgtggagatatgaaggaaaaataattaaaaccaactcttttagaaacaaaatactcacttaattagatatgtgtcgagcggctattcctgattataaaccttgacctccgcttgctacactcacgactctagttgacccgatctttcggtgagttcatgataactacgttttgggaaaaacattgacgattcaactacaactgtataaaacgttgttgtgttgcgtcttagcgatcgataaacctcttcatgtgctgttgatcttgtcagttcagatcaaccttattcctacaagcaaattgaagaaataagcaagaaaaagataaaagcaatctattattgcaaatagcaatcaaataaaaatggtaagctaaggttctgaagaagagtaattaggtggtctggccaacacacgtaactacaaggtaaagtagcaatggctaaaactttaatctaacaaaactcgagaaaccctgaaggggtacatagttatttaaagaggtgggaggatgaccaaggggtcccaaggattgtgctccaccaggttggagcgcatcccacatgggccccacttgggttgggtcccaaatgaaggtataagcccaaatgcccaagacaggtggcacaacaccttgtttcttcaattgcggatgactgagatggaatttggcaatgaggctggatctgttggaaagaggattccgagctagagcttttcatcaggtactgatggctcacaacggagcttgtatgcacatttggctaccgtttgaagtcagcactataacagattgccggattggattccagcacttgggcagcttgatcttgatatcttcttttttatgcatgatgtgaacaatggttgtatttgtggtagtcatggtcacatcatcctccccttcttcatgttaaaccgtcttcggtttttccatatggtgcttgtcgcgtagtgcatgatctttcccatagaaatgtctacatgaaacatacgcaacaaactttcattatgtattatcatcagttctttagcaaacaaatttaatatccaatgaaacaaatgtacctgatatggatgcacaacagataacatggatagcacatttgaatgtttcacttgctgctcattttgctctccccttcttcaaaagccaagtaatgacatgatactttttcaatggcataagttcaacccacatctacaggaggattttgattagttgcagcaccatttaattttcctttgatgatttcttcagatgatggaagtgcatcgaatttgagtatgaacaatggaatggcggctcattcatgtctctctcctccttttcatgattatacacttcctgcaaatggttagtaataggaggcaaaaatatagcatgtttcttttttatgtccttctctattttactttcaatattgcaagtagggtgtaacaaatgagaaagagatctatatctttgagaagaaagcatgtcctaaatttctttgttaagcccgaataaaaaacctcagttctgtcgcttattcgcattcatataaaccacagcgtaataaacaagcattcatttcatgatagtatgaaacaacagatatgttatcttgttttaagtattgcagtttgttgagcagaatgacagtataatatatgagaacatagacatctctcaaatatcgttcaaagtctttccaagattgtggttttttttatggctacaaagatatttccaatcagaataagcatttttaactaaaacactataggcacacataaccatatgtttctcagacaagttatgcttttgaaattctctatcaaccgctaattccctcagggccttaagctatagaggatatcgaaagatgacattagatgggtcaccagacaagcaagaaatcaaatcaccggacatctacatttgaaggagctgacctgcgggccatagacgtggttggaggcgatgaacttgtcgacattagtgtcgtaccacttttttttgggggggagggggggttgtcccgggcgtacaccttcttgaagtaaccgaagttgtgcgccttcacgccctcaaagtgctcaccaatccccatcgctgttgtcgttgtcgccgccgcatttggatcgtttcgacggtgaggtgtggtggtatcatgtggcgttcggtttcgcttctacttggacaaattgaaattgaaattacctcaaagcaattctctttttttgggagatttaattataattaaatgttaactactgaagtaaacatcaactgaactagtctgccattgcgaacgctcacgagtgcaatcgaatcccaggtttcgcttctacttggacaaggatgaggaagagtaagtgggcaacaagccaacaggatgagccccgccgcacgcagaaccggccgttgaagattcgcggaagcccataccagaccaccgtcggggacccgacgggcccttttcatcgagacagcagcggaggcaagtgaggatggaggcacaaggcgacagggcagacgtgggatggaagatgtcgtactttcaccggtcgatgggagacagcggttgcgtcgatttggcgaggagccgcctagcggctgtctatttttggccgaatgtcgcgaaagagaagaaacggagaaacatgctgcatatacacttcctcccccacccacccacccacccaaacaagtgataacttactaatactaaacacatttacagtcacaactcacaagtcataacttgcatcttactaatactactacttcataagttcacgtttgcaattttaaatgtggatggaggttcgtgggcaaatagagaacatctcacattccgtggagaaggcaaccaatcgatcattggcccaatcgagaaaatcgttacatagttacatctgccggccactgttatgtacattcattccgttaagaatcacctaatgttgtgcggactctccctagcaaatgaatatgatgcagcccctcgtattgacaacctgcggtatagagatcaacccgtgcataataactagtcctacaaatcacagattaaaaattatatatatagctacaaatggagcaaatctagatagagccgcataattccatgtgtgcagtgttgctatttatatttgaagatcatccagcgtcagttcatcgactgacatcatcttcagtttctgcaggcagtagcaatatcttgaaaagctatgcagtcgagctttcaggatgagattagaaacaatataaagtacttaccgtgatgaactggggaggatcatccagactagatgaaccaagtatgacttcccgctttagcttggatgtaagcttgtgcacagcacgtaactgcagatatatattaccggttaaaccttgcttttttttttaacgaggttaaaccttccaaattggaaattcttgtaacaaatgatgaatatccaaattacgaaagcaaaataaatctcaaagctacaacttaaaagaggagaggcatgcaattaataatatacctccgaccgagtggcgccaccaatgacaaacacaaatatacgctgaccaagctttttgaagtcactcgacgaatgcttcagcactgaatcactgcaaattttccatatactagttatatgcccgtgaaggaagacaaacagtggttatgtacacaaatgcaaacggtgtggaatagcttctcttgttccaaaaaaacgtgattttgttatggagattagtacggtatcactgacattacattgtaccacatcaagatgattaggagagtttaccttcctaacgtaaataatatgtattgcctaaatattatttagtgtcctaaaatagagataagttatttgatatcatacctaatacctccatcccacaggcttaatttcaagctatgaacttggacaaatacttatccaagcgcatagctagaaatgaagtccttttagcacagaggtagtagtggttagaaagttatcgatagttagggattagagatcaggtttgctaggaagtagagattgtattctttcgggacaagttgttcatgtggatagtatccgtggtactatagcatgattgcacgaggaccctcactatataagggacacatgtactgatgtaccccattataatcaagcaatacaaaataaaaatgttaggtctagcttgatctgaatctcctagcaatcaggacaagcttggcgtcaataagagtgatgtcgtctttatcccgatctccagacccttaccctatccatgaatcgacatgcgtaacacgttttcccttatcgataacgactatctcgggaacacaaaacacagacaacgaagagtctctaccactgaccttgaatacccatcatcagagccacgtggccgagcccatgtaccacctgtccgtctggatctcatagaatgagctggttggtgagctgggctagttctgactgagctgctcattggcagaccgtggaaacttgggctagggtcgttcatgcaatagtattcgtcttttggtaattctcccttgctaagcttctcaatcaagtcctgtataaaaggtacaagttaactatcgtatattttagtcaaatgaaggcaaaacaaaatatatgcattagtacatcctcgctttggagactatgccaatatccaagatgcctattatttgtgacttaatgcatcttgttaggggcatcattaagtatcatcgacagagaccagatgatttccctagttgtcaaagttatatttcagagactatggcaatatccagggtaaatatatggtggaaaccccaacttaggtgaaaacccatgtaaacctcaaccaaaaggtcatctgaattcaacaaaaaagaaccacacatgtagatgagatgatactacacaaccatgtaaaaaatcttgtccaaacgaagtcaagtttggacaagatattttacatggttgtgtagaattctcatctacatgtgtgattcttttggtagatttagatgacattttggtcaatgtttacacccagaaagttaataatgagatcatcatttcaggaaatgatacggaactacatagtgatattgatccggaagaagctcaacaggcacttgaaatagccgaagctaacatgagtagaactgagggtacgaaagaattggttgaagcgaagctagctcccagacgaactaggatacgagtcaaggctgttaattggattcccccatctaattgaagacaacccaacggtttagttgatacaaagaaaaagggaagagggtagcgaagcgaagtaggtccaaagctatctagtaatttttctacctacctacctacctacctactattggatttgaatcaatgactcaattcaagcaatacttcaaccactgagttaagcacgcaagagttttcacctaagtagagtttccaccacatatttaccccaatatccaagacttcttatttgtgactacaggtatcttgtcaggcgcatcctttctgaaaagtactaatcagacatgatcattcctacaagtaatatcaaagccattctccttatatgtatgtctagcttccctggtgcaatcactgcaatcctggtcgtgccttcaggatgcaccaccagggtcacagggaacgacagcccatacagaaattctatccacaccaaaatttatacggagaggaaaatatcgatgaaaactattcaaaaaaaattgcagatatcactataatattgctctaatatatttatacctctagaacaggataaaatcgggaaagtgcccatgtagattcttccccagttcgctcctttctaagtccatgcttcttctgttatcagtaggaatcaattaatacatcatgagatcaggttggtagcagataaatgttcagaaagaaccaaaaagaaagcaatatttcgtttaccttgtgaacatcaaatttaaacgtaaaacctcctcccgaggactttttggtgtcagggccacataagcaacgcatattactcacagcaatcatgtcatcagtggataatcctgccaactgttagcaagcgaaatttcttactgattcctggccaagcatatactcaaatccaaataatgtccaaaatgggctcctatcaacaattctgcacagttgctttacgaattactccctccattcgaaattgatctacatataatttttttgaggttattcctaaatgatctacatatttgtgttcatttattaagtctattcgttatttgtgcattggagtaaatggacattgatgcatgaatccatgcacacaagtatttataacccacatgcaatatcttgatttgctattggctaggaaatagtggggatggtgcatgcattgagtttgttgctagagtaaatatagtatgagagagttattagcttttcttggtcttggtgtacctatgaaatatgtagatcaatttggaatggagggagtaaaacactatgtcatattgttcacctgtgttacaccagatatttaatgccagcatagaagtcacgcttatccaatatgaaaagaaactgcatgtttcattcatgcacgtttcatgtattcaattattatcgcattgatgatagagagtaaagggtagacatacttggtgatatttcatgaaaagaaaatttacaataaagcaaaagggaaacagtggaaggtgaaaaacaacaacttatctagccaaaaagttgcacagaaaagtatacagattaagcataaaacatcttgggtttgttgagtacgaatagaaaaacagaaaattttacctgcatcaatttttcacccttgtcactttcgaacttgtctgggttgattgctgcatagatcatcagcaaacgcaacttgttttcacgacttacaccctgcattaagtagagtaaacaatgtcattattaagtcagtaatatcaaaacacaatgttgaagaacaaccaatgtcattctaaaaagtaattcaaatattaaataccaattgtgtcctcaaaaaattgattaattctttagttccagcatcaccaaatacaagatcttgctctagctgtccaacatctcgaagaccttgctcccttattatgctattgagtttacctgcaatctgtacaaaactgagtaatacaaatagaatgtccaactatttgatttatgcttcacatagtaaacaaaaatagaatactcatgatatgtgaggcaattaataattaaaaaaaatagctcaaaagcaattcagtcaatcacagaataaacacagcagcttatttaaagtttttaatagcttggagcaagcaaaaatatataggtaccatccttctggccatgccattgtggctcacattgcaagcaccacagataatactgctgtgccagaactgttgcaccagcaacagttgtttgcacgccagccacagtcaacccattgcaatggtatgcctgtggatgtgtcccgcgagataatatggtaaatatggtaacagcttgcgtttagtaacagtcatgccatcacagttgttactgtgtactacatcctaaataatgtgtttcgcaaggggcctcatcttttcgcttatgctcatcagctaaaatttgaattttcaaccttaaatttgaagctgattttgaggttttttcgtcgaagtttatttttcagcctctcgctaagaacacgtatataaaatttttattcacaaattacttttcgtttgcaaatatgccgtgaaacaatggctccgaagatgttttacagcacagaaatagtcgtgttacagattcataacagcattgcattgcctctacacatggtagaggggtgagaaaacctagggaatcagcacataggatgacctaaggtggattgtgaagagtttactttaactgaggtgggtccatgggaggtgggttagggcacactcgggagggaggtggggtgtagtgcttttcttttcttttctttttcttttttgggtgatcatattaataattttattgtctaaaaccaatttgaaaaccttataaaacaaatagacacttaaggcagggaaattaaaaaataccataaaaaactatctgatgtatgaccctctttattttgttatttaatcattttgactcatgcaaatatctaccttccagtaaatcttttaaacttttaggaagacatctctaatctacacccctcctatagaataactattctacaccccccaccccctccccttcccactcagcccgcacctcccttccgttctcccgcgcgcccacacttcctccacgctccacccccccccccccttccccctctcgctccctcctcccgacggccccctcctcaccctccggtttttctcctccctccctcctcccggcgccccccgcccctctgcctccctccgattttttctcctccctcctcccgaagcctcctcctccgcctccctctgtttttttctcctccctcctggtttttcacttatgcgcctccctcctcccggcaccccctcctctctcctcctctgcctccctccggttttttctcctccctcctggtttttcacttctgcgcgccccctcctttctctccctccggtttttctcttcttttcccgatctctctaatctccctctggttttttcctctcaagaaatctcctccctcccttctatgcaaaaatgaaaaataatattgttgagaacaagatttgaactcatgacctcataatccctacgttgttgccctaaccaataggacttgtaagattttgtgattgagtaatactttctatttgttttgtaccttctttcaaatcaagaattaggaacccaaccctaatcattttcattaccacaataggggttgtagtaagaaatcaactatgttactgcaaaagttattgatcgttactatgttcccgtagtaacatcattatggaattgtagtaacaagacatgttactacgaaacttataggttgttagtagactttttgcggtaacatcgggatagaatggcagttacactgaacaatgtggcaacaatatttctgtagtactgctttgtttagagaaaaaaactttaaaagtttcaatctttagagagcaatattactcgcatcatatcttgtttttctaatccgtttgcaccatgatgttcataaaaaagtgcttaacgaacctagatccatcatgactatattttaacgtcgttactatagaaagcagccatgatactacacattgaccatcacgttactacaatgttcctgcgacacaaaccaaaaaggggtgggtgtggggggaggtctctcatgggccaacccacctccccctccctagggcccaaaacccacctcccacttcggtcaaagaacggtcaaagccccctcccaccggtcaaacccgcctgctacctccccccacgcccacctcttttcaattctcgtctctcaagaatggcgtagtaacgcgatggtcaatgtgtagtaagttgagtgctttccgcagtaacaatgtcaaaaaatagtcatgatggattggtgcaaacagattagaaaaactagatatgatgtgagagatattgctctctaaaagattgagatttacctcttttcagttctcgtctcgctggaacggcgtagtaacacgcttgtcaaatgtgtggtaacacgattgctttccgcaataacgatgttaaaagttagtcatgatggatgtagtttcgttaagcacttttttacgaacgtcatgatgcaaacggattagaaaaacaagatatgatgtgagagatattgctctctaaagatgagatctaaaaggttttagctctacaaaagcactagtactatagctccatagttactattacatgttctctgttcctgtaattttcatcatgatgttaccgccaagagtgcagtaacccataaattttgcagtaaattatcatgttactacccttctatgataatgttactaccgaatcatagtaacaaggtatggttcctacagtaacataactgattttgttcacacaatttgaacagacattcaacgcaagcaaacaatgatctctaatcacatagctcatagggtgaatcgtttatgagagcttgccacgaaccatgagatcaaatttatttttaatttttctaggttaagccagtttccttgagagaaaaaatcggatgagggagggaggagcgctgatacaggagaagagaaaaaaaaagagaaaaataaggaggcagaggagggcgatatgggaggagaaaaaaagagagaaaaataaggagggagaagagggcgccgatagagggggatggaggagggagatcaggaggggggagcgaaaaaagaggaagagagagaaacgcacggagggaggagggagggcagggtgcacgagttcaagggagggagcgcgggggtggggaagaggagcgggctggtatgaagaggagggagtgggccaggataagcgagggtgtagattagtgtgtgtgacaattggtatatataccagttgttttattcatgaaccaaggtgtggacatcctaatcagtggaaaatccaaaaaccagtccaaattatgaaatatgtatgttaaagaagggccactttcatcaattttttgtgctgctattagaatgcaaatttttaaagaagatgaggtgtttagaaaaattaataaattatgtgcttgattaatctggaaccttaagaatgccttattctaatcaaatatgcattgaatagcatgtgcccttttttactggtgaagaaaaagttgacattccatggtttgacactaacaaaattagatgaaatttgcaaagtataaggcagagattttaacttcaccattttggaataacatgagcagacaaacaattcttgagaaggaaaatagtgaaaaagtagggaattttttaagctaaacaaagaaaatataaccaacctcaacatgaagagaaagcttctcaatttgatcgctgtactgtggaagagcttgaaccattttttgcaaatctctattggatatctctcccccagttctggtaatttaaacatgaagcaatgaccattaaaataataagtcaagaacattacaaacaaaatggactcatgcaactcaacatacatgtccaaataaatatatagaaaactttatgaatttttttctggcattcactttcctaaagaaaccactcatccattaacatatttgtgtttcagggttaactcaaaaattgtgcagctatacacagctatgcagatcatgttgtatctacagtagttctccctccattcccaattgatagctgcatcaggtttgtgcagcgataccaagggagaaataaatcaagcagtaattagcagcgatactggttcggtggcccacacatggcgcatgaccattcaacttttgatggtagatttaactaatcttgagataatcactcagcatgcatgcatgtgataaaaaaaggaggggatttaactaatttccagaaaatctcttcacattaaatccacgcatacatgcaccagataaacaaggaaatccactggctcccaatgttgtgcgacaatcaaaccagattttttttcgtttcagtaatatgatgatcaattaggaatggagggagcatttaagaaacagcacagtcaactcagaagggttgcgttacaactaacttttgtacatatataaatcagtaatcaacctaacacattttggaccttttagtttcattagcttacagtgtgtactggtgtaagattatgatttctcaaaatgacatacccaccaattttatgatattttcttctaagctccattgtgatgcatgagtattttgctaattgtttataacaacgaatggtcaaaaatcacaacagagcaatttccctacttggttgaaacaatgcacagaccttgcttgctgcagttgagcagctttattcttggacacaaaattgctcatcttgtcatgcagtctttcgcttgcctgaaagtatgatggttaattataaagctatcaaacacatgaatcgcaaagaaaggtactgaggagtaatctcacatctgctatgtgggcatgccggagctcaacccatattggatcatgatcctccaataggacatccttcttttcagttgatgaaccatttttactcggaaccttttctttcagtcacacataagaatggaataaccatcaaatgaaacaacagggaagaatgttacataaaaatatataaaaaaagaaactctctcacctcatggacatacttgttgccatccatacatagaagatcatggcacatcgcgtcatatgtccattcatgaatgattggtgcaatctatggtgccaaagaaattatgaagcagcagcatatatagaccatgctcaatgtagcactaggatagatgtcaaaactgcgtatacaggtatgtttacaatgtacctggtctactgaacgatcaactataagtagctcacatgtctcagtttgaggataatccggtattgatgttttcaattttgaaaggcaattccaaacagcagcagcaagttttgtaggcactaaatctcgtagtgttgtcgttacagaagcatcaattgtcttggcgacacggtagtgcactctagggaattcctgtaatttgttgaacaatacataaaaaaagtgaattgttacctaatagttactctagaacgacatgtgcacatcaagcaccaaaagttattcattgtatgtccatggaaagtaaatgtattatgtatacagaaataacccaatatgtggagcagaacatcagttgagcatcaaaatcttttggtattgcccaccttcttttccagtactcactagggatacaaacaggtcaggtcaagggccaaccaaattgaggcattgacctttgctagttctttttcttcagaaacagctcaagggcatctatgggggcacatttaggactatcgtactgcatactaaggtaaaaaaaacccaattaagtggtaagtgagccatcaataagtatgggctaatgggccagaccactggcatccctaattttttcacttgcaactgcatcatttatcatctgaaaaaaatgctgtctgattataccaggagttcacttcctacagagatagttcctttttgtcatacaaatcacctactttagtgttgatgaatgtaggccaggtcaggtcaagatgatgacctaccggaactgcatagcatagtgccaactgtcaactgtcaaccacagtgcatctccgacattggatctgcaggcaatttatataacaatctaggagggatgtgttgagctctgcctctgcattcttattgcagtctttgctcctcacgctctcctcttcttcattgtcccacataataattaaatattccctccatcccaaaatataggaaagtagctatattttgggacagagggagtacatagaaccacctttttttttgggggggggggggggaggggggggtttacttcttgtgacatggatactactggtttattgttttgacaagaattatgtgtgcttgtgtaataaaatagtaagtacccacaaaccaaatgcttattgttttaggccactaaataggctgagattacaccatgactatgaacaaaaggaagttagcagaaattacataacagaggtttcaggtgctggctgaagagtccaggatgtgggtatagcggacagcatatgagaagtgggatcaaaccaacagggggaaacacaggaggaattcaagagatcttcgctccctgtgatatgggccttacagatagagggtctagaggccgtattatgtattatagttaagaaggttattagttagctaggaagttggacatagtttgttaggaagggtcagggtatttccaatgcaataataaaactaacaatcttgtttctgtaagctgccacatcattgtttttgcttaggagagggagaggagatagaaacaagaaacaattagatagaaatgaacattactgagaagtcgtatctatcgtcaattaggaattccatgcagcaattaatgcttgtggggccttgtgaacataccatgcattctaagggctattactactgttgtttacatatgtcatttctgtatttggaatgtccttaagttaatcctatcgataaaaggacaccacataccccattatgaaacaagcaatcaatctatatggttagtccagtaagcctaagagtcactatcacaacaagtgaagccctgccagcactagtagagggaaaggccttatcccatcagtctttggaccagtttcacatttcgtgggacaaaccaaagggcaatcctgccccacatatatccctaacttcatgcgatcatcataaagcactttgtttagaactttagatctaaagcaccctatttttcagacctaaaacactttggtttgcattaaatcaggatatattaacaggaaacacaaaaaaaatgtgcaacagcatctttcacaaataagaaatgtattcataccctcattgatgcaaacactgtagatatgcgagtagccattgtgttcaaacaagcattgtacttgtgtgaatccaaagcattttcactaaaaagctcctccaatgctctttcatggtcagtggtgaaaccctgcatgcaatcactagcaatataacgtaccagagaaaagggattaccatgtaatggttggtactttgactagcatctatgtcctctctataagataataaatatggtatcatcattcaagtagcacgataaaatttaccgtttacactaacttgtaacagtattagatataattagaaaataggttaccagttgacaggcaaaatttctaaagttggttatttatcattgcaactaccagcaaccaaccaaaatgaccagaatcaaatcttagagaatttccaataatcctagctgtgtatcatggaagtattgaaatttacattaaaggcaattcaaaccattcttgtcactgccaatgattgggtttttcccacgttgctcatatcattcgctcataaggcgtatctattgggtccctttttctcctgaccaagccagctggcttctttcaaacaaaaaaggatccagctgatttgcagaaataggaaatgaactcctaaaatcatgcacttgtttagggaggtccacgatttaagatagcctattgtaaatgtgcttccaagaaattcagaaatatgctttaaaatttaatatgtacagttagggcttatgtaaaagtcaaacagcaaaaaaaaattaatatatgttctgtatagaaattatttttgagaaatttttttggtggcagttcaaaaccagcttaacagagctggcaaaatgactaaaccagaggcaaaaggaccctagatgtgggatccacaagcaagaatgatcgaatataagcaaagtggcaaaatcagttcagatatctttggagtgaaatcaatgccattacattcttgggagtggcattttttcaaaatggcaaatttcaagtggtatgaacccgaaaagcccaaaatgggaacaaaaactcagaaaaatatttagttatcatggatctgtttacagtataacattgttttcaagttctttaaaccgaaaaatatattaggtcaaaaggaaaatgacgatgtgtttgtgagctatcctatattattaaccaaataacaccaaatgcttctccttttttaattgcatgagaacttctcaagttgtagagcaaagtatcagggctcaattgctcaaatactcaatcctatgcgtaaatcatggatgaacaaaacaattcctataaaaaattgcatgaaattatttatgcttcaagaatatatgtaacagatacaaactataaatgaaacactgaaatttccgcaagaaaaaaaaacagatgtgccatgatacctgggaatcaatagcaaagtactccaaattcatctggaatacaacgaaaaataaaatgtgaataaatagttagcataacagtcttttatatttaaaacattctggaataaaatataagaggatagcataatccaagtaacctcactaagtgcaccaatacggggtagtacacttgaatctttttttatttgagtaactaattctttctgtatgggagaactgaaaaacacatacgccctacaacatgatcaacaatctatcagtgaaagaaacagaatagagattgtacataagaggagattcaagtggcggtttatgttaattcagacatacttcttgtataacggatttcttccggacatgtcattcaggaacatcccaatgctgcaacatgatgattaaaaatcaaacaagtgtaatgtgtgaaaaagttggaaaacgaactacaagcactactgacaagtaaatagattatggctgtgttcggcaatggcagtcaggaactaatcccttgtgcatgcaaaacggagtgaattattagcgtatgattaattatgtattagctaattatttaaaaaaaatggattaatttgatttttttaaagcaactttcctatagaaaacttttgcaaaaaaatgcattgtttagcagtttgaaaagcgtgcgaatagaaaaagagagagatgagttgggaaagaaggtggaagaacacagcttatatgtggatgatgagtgctgatgatgagagatgagcagggctaatagcacttatgagtgctgatagtgacaggaactgaacttctttctataggaaaggaaaaacctagttgatctccacaaattgtagttaatgttaattctcttttctctcatgaagccataccacctcaactgtttctaccctttggatcatttatctatggttcaaattatccatcttctctcatgaagtcacgcacatgcaaatcatctcaattatttatagcttttttccaccacaatcacctcaaattatttttagcatttgatcgctgatgcatttagggagaagaaatatatcaatgcgatgatagtaaaacaaagttggcagtcaccaaattgtgacttagggaaagggaactaatatgagagattatatcgatgattaggagactgaaccaatacgatactccctcccgtcccaaatataacaatttctagcattcaagatttgtcccaaaatataacaacttctccaacattctctacccaaccaatcacaaccctccacctacctctacttctaaaccaatcacaaccttcccccattttattctacctaccttccccatatacccgtgtccaaccctaaaactgcttatattatgggatgtagtacattatatcgatgagatgatcggtgcaattttattttgcacttaatgttttcttattatcatacgatgatgcgactttcccgcagcaatgtacgtagtttcatctagtagaagaaacagatctacaaattaagagagtaacacatcatctgaacctttagtaagcaaagaaaagggaaagttatacattagctacaaattgttatacaatgataagaatggtcattgtcatgtaaaacataaatgtgataaaacctcaccccacaatagaatccaatgactttaagggcctgtttggccttgggcatcaggtgtgagctctcttattagtctttggggctgttgttgctttcttcagagaagctaacttcctaatagaatcccaaaaattgatcggctgggtaagcccaaaggctagcttattttggaattactgggaaaatcagggatgaagtggtaggggatagaaggaagcagctttttggcttatttctttgaaatagctttaaccatctccaaaagctaagtggtgatagctctaatctagcttcaattggcagccagtcggggcagaaaaggccctagacatgttcagtacaaactaattaagtgattacttccctaacttattgcaatgtgcttaacaacccctgtctggcattgcatggtaaattgatcaaatataatcgtgcaagcccatcatcgtgcacacccacaagcagatcttttgtgtgattgcactccatgagctcatgctacaatcatataagtgtgtgcacagatatctggaactccaagaatttttggcagaggtaactccaagaattttcaattgctatgtttacatttcatatttcgagtaatttcagaaagccatatgtattacggattgtggcacatgacccccaggtttatggtctaaaggttatataaaaccccatctttatttaaatctcagctaattttcgtatatttgaaacaatactgttcaaagtaataaggagttacatcttaatacagaaatcatatagacactttatgacatgaaaacttaagtaaatgtgtccccaacatgttttatagaaagtgaaaatagagagtggctgtgtgccatgttcttgagtgcatgcctatctctatgcctaataagtgtcaccatcttgatgaatcctttgcttcctggaccccaacacaatgttcaccaaataagtgaaattactcagacgcatcaagtttaaaacaagctatgggaatatttggattttgaactacaacttactatgatttatcccaaaaatcatgagaattttgtaggtcctacttttgattgaaggacttgggtagcgtttgggtcttctggtatttcaaaaccttcagcaatggtagaaaggcaaatgtatacgagaagcatcagcatcgacataggcatcagatcaatacatctaactagcataccactaacccccacgttcctgcaagttcaatggcatatagcagaatgccaattctccaactattttcatattggcacacagctgtttttttcccaaaaagaaaaggatatgatctagttttacagtaacacataaacggattgcacaacagaatcattgcaaacagaagttgtatagatttgcttacttttctttagttggttgaatgaaatatatagcatctagtgaaggcaacggttgtctccgtttgtacaaatcttcaaccactgcaaaagaactagcataggtgagactttacagacgatgcatctactggaaggctttaaaatatacagtgaacaaatatttcaacaaataacaatttaggaattcgaaggttccagagtgcgaagctagaaaaaggatacaaaatggcatgtaaaaatcaggataaccatataagcataaggtgatatacacagaagcatatttgaatcagttgaaagagatgatactgtagaaacaagactttggtggtgtcagctgaaacacataagcaggaccacaactcatgcaccaagcagcctaaagaaaatactcggtcataatatttgacgcagttgacttaccatggagcttgacaattcgtcttattcgtggtcttattcaaaaaaaaaatctgtaattaccatttatttattttgaaggtacttaaagcatgacttagcatttttaataagacgaatggtcaaacttcatggtcaaagtcaaacaaactgatcaaataatgtatttccttataaataaaacaaaatctgagaaagaacaaaatgtgtgtcactacttacatgaaaccccttcttctgtaatatctgccatcttacatgaacatgatattatcttgactgtaagtttatccataataagaacctagaagaaatcataacaatttgtgtaagatgctgcacaaattacataagggaatttgttagagaagggcataaacatattgtagaaatttcgatgttttcataaacagatatatctatagactcaaaacttcttcaaataaatatagcctcctcacgaacatatctaaaatgatcattaaatgcaacatgcgaacaatcatgtcagcgtgtgagctcagtgcccgtgggtgcctagactgccatttcaaatatgatcactagatgtttttcatactacaaattaagcaataagcatcatattccaacaagctcccagttaatggaatttctagtaatcccttcaaagtttatgttttcctagcaaagtgagttgaaccagcaaatgcctgtaaataaatttagaatgctgcatgttatatttctgtaagagtaagttgcaccatacaacaagatgtgaggtgagtgcaagtagggaactagaggattgctcatttacactaacaaacttgttttgctggtacacaacaggtcaattttacccttgatggcattttctatgcatatatgctgtatgtgatgtatataggaaggaaacgagagatactttatatgagctaagtgggatacctaaaggtagtctggtagtgtcacaatggcccaaaatttattttaatgcaacaatgcgtgcaacacaaattgctcgcccatgtataggtacctctgtttccctttttctttttctatctatgtctctcattggctagtaacatcaccaggccaccaggcattctgagacctttcctataaaataagatcctagccctaaacgaaatggtgtttaaattacactctattaagccatcacaaccacatcggagtatagggagtcaacgaggatgaaaattgtcctcttgggctggtgggtatgagccaaacaagattgctgacacaaacgagcaaatctcaagttccacacttgcactcaccctgcaagttgttgtacatatgatgcaatgcagactataaatcaaaagaaatgtcatatttacatgttttccgactttatcattattcaatgtatacagcagggacctcaagtagttttttttccttaaaaagatgcatacgtgttttccgactttatcattattcaatgtatacagcagggacctcaaaagaaaccatgtcaatctgaaaggtgcccaggattccttaccttccatgttgattttgaatgtttcctagttgacctgagcatttcaaataataaacctgcatggtcacagcaaaaaaaaaaaaggttaaatggaggtgctttctatatgaaagcagataagcttgtgcaaaaacagacaataacagtgctccttgaatgaatatgaatagagaattgaaatgtgtggtttggttggaagtgtgatgaagcagaaatatacaacatgaaacttgccatgcagagaattacacggttgattagtataccacataagtcgacaagacaaccaagtcaaaataaggtaactagcgctccatggagcagaagaataaatagatgaaaaataaaaaaggtaagcttctgtcaagattagttggccatagaaactacaatcatgagcgaaccttttgctcacaagtcacaagacaaacaagacaaccaaaaattaaatatcctgcagttaaaacaattataagaaaaactgtgattcagcaattatttctcaccagtaaattttgacatcattaactgtacagaacagaaatggttttgactaccactaaataagcaagcatggcccaattcatttcatcgtcgggcatcctaccagatatggcttccatatatcaaagaatagtacattccagaaatatggaaatcaagagcacaaagaagccattgctgcataacagactcgtccaactagacaccagtagtacaacgatgatgcagcagtgaaggcatctcaggtaaaaaccaaataatcctgtacgattttctactccgataagagctctaagcaaacaaattcgcacaaccacacggatttttcctatctccacaagcaattgtcccagatccatccccaacagcagcatcagcagcagcagcaagcaagcaaatcgggagcagcagggatagaggaagcacagagtggtggccttacggtctcgcgtgatttggcggaagctccggtggtccccgccctgggaggaggtgtccgagtccatcgacatggcgccggagatctcccccgcctacttccggcgacgccgcctcgggctgcgctagtagggtggagagaaccactagcctttgacccgccccgcgtagaggaggcggtgatcggcgggcggcgagcaagcagaagaaggggaagtcggagagagatcagagggaatgctccgtgtggccgcgtgccggagagaggaagaagagaattggggggaggaagcgcgtgcgcgtctccaagaggtcgtcggacggtggcggccgaggagattttaccagattgccccccccccccccccccccccctcctctgtgcttcgttggacttttttttttctttttgacgctgtgcttcgttggacttgacctgtacgacttccatgctaagaaaaggggcaggcggtgcggttgctctgcaacctttattcgtatctatgtgacatgtggggcccacttggtacccaccggtcattggttatagttgagtgaagccgacgccactcgctctcaggtctctcacagtgcggtgagctggaccgggacctcgtcgcgccacgttggatttttgccgccgtgtcacttggacccgcacctaaactaggttcctcgtcccctaggtgagcgacgcaaaacctcgcgaaatccagggcgcgcagcgaggagaagacccgggtcgcgcgcgctgtgggcggcgtagcctcgccctcgcgtcgaaaccgtagcgcgaaatccccgatttgccctcccaaaacccactcccgccgcaccgatttccctctcccgccaccaattcctctgctcccacgccgagaatcctcaaaattagcaagcaaaatcaagaacacagatcgtcacggcgattaccagaagaatcacacaagagacacaaaatcatagaagaaaatcaagagtcacacaaaatcacacaaaaaaaatcaagaacgccgccgccaagaacgccaaggaggagtgcgccttcctcccggccgccgccgagctccgccgccacgcgcgtcatgacgccaagctccgccttggccaggtcgacgccgagcccgtccaccacgctccagggcggggctagcgccgccacgcccctggccacgccgacccctccctgcctctgcgccgccctggtgggggagatgaggaggcgtcacgggggagaagccgcgatgcgtcggtggagcggtgaagttgtcgaggtcgtccgggaagaagccgcgacgcgtcggtgacgacgtcatccatggggggccggatgcgagactcgccatggcttcctgcgagcttcttgagctcgcggagaaggagcgaaggcgcgaggggaggtgggggaggagcgcgaggcgtccccggcgtgccgccacggcgtgggaggcaaggaggcgcggcggcggaccgggaggaggagcggcgtgggaggcgagacgaaggaggcatggcggtagaaggagagaaggaggaggagcggtgaggagagaagggtaggtgaggaaataaattgcgttcggctcccgtgtcccacgcgcgtagggtaacacccattgtgggattcttttccttccatagtatctccattcaattaggtcacgtaaaatagaatccttgcactgtgggaaagagtgtctttgggtctttttttggggctaagacacgggctccggtgcttgcactgtgagtgccctcagattagacggtttccactgcacgcttgaaaaatgaaatggaccaccaacaatctatactaatataaaaaggaatagttatcttcttccaatccgataggtaaaatcaacaggtgaaatccctaccgtttatccgcatcgctctaatccctatcgtccacaggatttcaccctcccgcaatgaccgcgatttcactcccctatccatccaccgcgattttcacccgcgctctcgccaccacgcgaagactccgcctccgcgctattctctcctcctcacgtctccccaccaccactccactccaccactggccccgccggagacggagccgaggtcttccgccgccaccgccgccgtcgccacactccaccgctggccccgctggagaattctgcaaaattatcatcgtccccaccgtagcgcttgctcttcccagccaccgcatcgcgcaccacggcacagccatcgagcaacagcacctcctcctccccgctgcctactccaccgagggagaccttggcatcatcgtcgctgccctcaaaccggcgtccaaatgggatgggggaagggagagacagtggcgcatttgggaatgggaaagagttaagagggggagaccgcggtggtagtaggggacaatggagaaggtggcaccgtgttaggaactcttgtgggctgcaatgtgggccagttcagtggccttctaagcctagcccaaccaagacaaggaggagaactacaaaacagcaaagctgcactttcaggggctatcgcaagatcaattggcaaacggcgacggcggcggcgacctggtggccggttggcaccttgtcgatttccttcctccctaccttccttctccctctatcttctccatcttccaccacttgtatccccttagttcatcctccttccacctctatttattggagtatggttgctattgtattggatgcttgcatatttgagtggaattgagatcagaggttggggttcctaacaaattggtatcagagctactcggttcgtgggatttcttgtcattgaggtcttgggaaggcagcagtgcaaggtggaagaagaattgggcaagggaggtgttcaagaatctagcgcacacaacctgttcgacagactgacaagccaacataaggtgttcaaggatgatgaaaggatagcagagcctgttcccatcaagtccaccatgaacaaggagggaatatccatggacgaagctttagatcggattcttgagaggtttgagttgatggaggccaaccgtagacaagaggagaagttcaatcaaatactacaaaagctggaggaggtagaggctcgtaggagcaaggctgccgaggagacaattgcatccatcagggcaaccaccgctgtcctcaaggctacatcacctatagcacccatggcaccacctactccagcgtgtaccaagtgtttgacagaatgccccaacaacaacctcacttgggcgacggtgagctcaagtcacattagtgaggatactgctccaacagttgcctgggagctaggagacaacaaggacaagggccacgccccctgcgtcgtcacaaaggactcactcgaggtcacgcccaccatgtgttcgacgaaatgctccggtcctaccgttgagcctgatctcactgtggctgtagtggttacgtccgccaccactgccgcggcctctatggagttggtagctactgggaacacaatcggtgccacttacatcaacaatcttgaccaccccaaggtgacgcacgccaagtgtttgatgttggaccttggctccaatagtggcgacaaccaaaccatggtcacgttccagaccttagtggacatgactaaaggcgtttttgcacctgatgcaacaattgaagtcagctcaccaaggaagatcgctgaaatggacttggtcatagtgatgcctacagggtgttcaatgctattctttgacaaaggtgccagtgagttgctgcctgtaaggagacatgttatgtggcaattgttattggagcagtgcaagtgaaacccttggtcgcctcctaactcagtttatcaagttaatggaatatgggagttgtggcatgtgccctggatagacttcaactattttagaacaagattatgtttgatgccaccttagccaccatcgactcaaattggaaccataatgctttggctggtggcaaactcatggttgagaatagtagagctgaaaccgtggcctgacccacaatcaagtcaatgtagcataggcgggaggtggactgaactgaaagttccatggtcagcacttgattgtgaatgttctatgggagatgatctttgcagtgcaaattgcataagaaacgaagcactttctgttacattatcttgtgcacctaaaggagatttaaatcataaaaaaattgatggatctcagaaggataccttggtggcattacttattgtaatgaccctaaaattttaatttgcttcgccgcgctgttggcaacctagttgagctcactgtgttgagctgaacgactagttgtgtcacacgattggcttggatttttttttttgcgttagaggatcgattcatatgcatatatcacagttgaaacacaaattagacacataagtaaattctttatttcttcacatatacattatacagtgttgttgcatacatcaaatgcatctcatacattattcgtctaaaatagaaatagtgaaaattaaataaaaatgttggtgtgatctgtgaccacacctaattgctttaggagatttcaaatataagatttaggcaaaagagaaaatttagagttgcttgatgtcacatattttgcaaccaaaccattttggggcacaaaatttgtaacattagccatctcttagtactttccaaaactatttatttcttaggtaaactctgagtttttgggcaattgaaaatcagtccctaaattcaaagtaatctccatatttttaaagtctatggtactataatgcaaaagttacaaatatcatacttttcactagatttttatttaattgcaaatctgtgaaaaattatgctgagcctccaccgaataaaccatgcttaggtgtcaaacagggagaccactagtaaaaccttagtaggtgagtcacctagtagtcaaccatgtccatgtgacaaaaaccatatcagtgtgaaccccatcctgaccgagcctcgttttcctcgtagagaccaaaaccagttagcaagaagaaccaccataaccagagagtggagaagaaaagaaaaatacaagagggcaaactcacccaacattaggtggagcaggggctccagctccattaggagcaggtaccccagctcaaggaggagacgctgattcagtagaatcaaccaaccaatagaagctgcagtagaaaaagaggagttcaaccatatattttcacaaccactgaataagccacaaagaggtaaactagattaagagcatcatccatggcatataatcatgattagaagtcagattattttacaaatcaagaatctagagaccatattatttgcattacaaggttacagtggcacacatctaactaatttttctattgtgggacattatgagaaatagaacagaaaaatagaagggggaaaagggatatggagttactggtgagggttgtggccggcagagttgccatttgaggcattggccgtctccacggcgaccatcacaggagttgagtaccaatagccatggaggacaacaatgctcagattccttgagagaggagaggtggtagtagaggatggaggtaaagcaggatatgagtttgtgggaactagggggatcaaatcactgcaggggcagctgctagggagatcgccggagtggggcgtggcagccggcctgagggagagcgtcggtgttggcggcgctgtttggggatggcggcacaggagagaaggcgtgaaggagagaaggagatagcgagagaagaagatgagaagaaagaaagtgggctggttgggctttggttttgtgggctagactaaattaattatatatagtctctaggaaattagttttagatttagaatagaatgtgagcaagtttatatagcatacaaattgatgattctaaatttttgacattagtgctaaaataaaatctgagcagagcaaaataaatttatataacagtacctgatcattatatttgccattcataatacatcattcatatgcattgcatgcggtaaatttatgcgttcggaatatgtccttattcggacttccgtatttttttcagaagttcgagttcccgaggaatcattcatttcgactgaatctgagggtatttgtggtgttttctatccaggcaagtccatctcttgatcatattgcttagttatttcaaatatttgcaacctatataactctcaccattgcatagaaaaccagaaatttatttctgaatgttaatattgtacatgtggatctgtggatcagttctttggtgatcttaataattggcagtctgaacttggttgttgtgtagttcagctgtatatgcttaacatcataaggttaattaacaactgctgtaggtatgcaagcgccgtagcgatcgtgtcgaccatatgacctggaatgggataggctggcttagtagttctttcttaatggctttatcctgcgggcttaaggacttccgcgaatcccgtgagcgtgggctagcgatgagggttgccgttgttgcggaatccgattagatgatgtggatcgccatttttgcgggatccgatgattcgccgttgttgcgggaatcacccgcagagataattgacagatgggattgatgaaaagcttgtgaccttagccttgctggcatacaccatgaagtgtgctttaagcgccgacgggcatgggcgttaaaaggtttaaggcgtctatgggtatagcgacacacctctgcagagtgtatgaattgtgatatgtcactccctgtttcgggtagaaactgcgaacgcggtaggaaagggatctatcggagattctaccctgtggtactttatatgcagtagtgttttataattaaaatttgaatttttgcaacaaatatttgtcaaaaacattatgaattctttgaagaatcttgaattctagagatagttgcattcacacattttcttgctattgatgggcttgttgagtaccatttgtactcatcccctatgttaattccttgtatatagatgttgaatcattagaatctgttgaacaagaatatatggctggaagtgaaggaactcacgttatggatgacaaccaggaaggactctacgatgatgctgagattgactatgataattagtatataatatgcatggttcatatagttgctgtagtggtgatggtagtagctgtggcagcggtagtatttgtagtagtagcagtaacattaatatgagtagtagtaatatctgtagcagcacttgtgaattttcttgtgtgctatatatgtgctgagtttttggggtttgtatattattttgctgttatcgctcgaggcttgtcttgagctgtatctatggtactgtaataaccggaaccaatgcgatgtttctgctatgctactctgatgtgcatatctctgagtaaacggtgtttatgaagatatatgctatagacttatattctactcttgttgtggaatatgtgggtcgtttcacttatcttggaacatttccattatgtgggtgatgaagaaaaagttacacagggaatgctaaatggtctaattgcagtgggctgcaactacttgatcctgatcatgtgtgctgctataatcacaacaacatttcatcttgctatgattacaactcaaggcaacaacgtatatgggacaaatcaattgcatgagaagctcattgccagattgattcctttgaccacgagaggattgcccctgccaattcatggtaatggctcaaatgtcagaaactatttgtattgtgatgatgttgctgaagcttttgaggtggttcttcacaagggtcaggtcagccatgtgtatcatatcggtactgcgaaggaaagaagggtgattgatgaggctaaggacatatcggtatgagattctatcctttggccaaaactgaagcatgttgatgtacaggaggatggaaacaacaggtggactagagatttttcaagtagaagcattgtattgaaagggcgaaaagattgtggactttgttggtgtgcactggatgttatcagggacgtgaaagttgatcgggtcctgcaacttttgaagcaatatggttcagcaaaattggtgatcattaattccttgagtataccatgggatccaggcggctctcgtgtgacattggctgggcgttcttcttgtcacattggctacattacaagagaagtattaacagaggaaatcaagtataaatcattgcatcaaacatatccgttggtgaagtttccacaattaaggtcatcggcttggggacaagccgaattttaagaaatggggattgttaggaactcttgtgggctgcaatgtgggtcagttcagtggccttctaagcctagcccaaccaagacaaggaggagaactacaaaacagcaaagctacactttcaggggctatcgcaagatcaattggcgaacggcgacggcggcggcgacctggtggccagttggcaccttgtcgatttccttccaacctaccttccttctccctctatcttctccatcttccaccacttgtatcccttagttcatcctccttccacctctatttactggagtatggttgctattgtattggatgcttgcatatttgagtggaattgagatcagaggttggagttcctaacacaccgccaatgttcggccctgcgacatgaaaggtaggtttcctccaagaccagcagcaacggtgtataggctacacaggtgatgtcacaaccatgccacttgcctgctgctggtgcctccatctccctaactcacggagcatttcttcagatctacagccatgccatgctgagtcaggtccgatctacagccatgccatgcggaatcaggtctgatccaattccctacttgctcctctccttttatcctggtttactctttcgctctccgatatttgatttatggcttgttcgtgattcgtttggttaatcacgcattagtttgttgtttgcacatttaatcctctaagcattataattggtttatttcaaattttgtaatatagaaagattctgctgacttgaaaaaaaaagatctgtaataagatggctgaagtcttcatttctgtcagcaacgcgtaactaggctgcacatgctcctttttcttccaattctaaatgtgaagttaagatatgtgattcacttccatcttagttttgagatgcagcggttcgtagcttcccttgaaaatctcatttgttttttaatccaattgcagggtgccgttgctctcctggtttggaggttggaccattttctaagtcatctttagatttcataaaaataatattaaagtgattagaagaaattaagttatcctaattcgtgtctcaaagttggtaatcgacaacacacttcgttagaacataatatgttttttttcatcaaaatcaacagctctcgagtccaaacatcattggaagctttttggctccatggcagattattttttcttttatcccatagttatttttctgtgtcgcactgctctacctctggaattttcataattccataattcaagcaaaagtgtttcaatatttttttatactatttttggtaatagcatcgatttcatgccagtggcaagcctatcaagtattttaatcaaagaatggaacgctttttgtagatgtacagggaaaatggaaatggtacaggtatttcatattgtcctacgaggtaatatttcttcactcggtaatctgttcagtcaatgaaaagttgtgcaatctcctgactctttcaggacatcgacataactactacatggacagggaagagttatgaggtattaaaggcctgagattcatggaaaaacatatcctcgggcaacatgttcattaatgtaccaatgtgcttgatagaatcccactgcaaggaaatttgtattgttctgatcaaggcacaagtacaggagaaaattgacgtatttttggatatgcaagcactgggcattcaaataagatctttttgtcatgctttctattttctatttaactactggagtataacgtctattttcccctgagccaaaatacagatgaattgttctgcagagtgtaaaattgggcacaaaaatgctgagtaattgcaccataaatcaataaatcactacgtacttatacagattggagctgtttattttccttccactcaggcttcttgctgttggtgcaaatggacttgcaatcaaatcaaatgccctgtcatgagaaggaagaggtggcctggccagccgaggtcgcgaccgatgtgcttgcaatcagcggcaaagtggaagctagagcagccggatgtcagcgagagcatgcactgcctcaatcatgagcttgcatcgccgagcttaattcggagtctgccatcaacataggtcatctttcctaaccaacctcaatttgtttacttggtccacatctttggcttcgtacctcaagtttgatgtaattccttcatttatgcgccggttaagttattgcttggtttgctcttgttattaatgaattcttactatttatatgagcatcttacatgacaaatgcagattgctacttactttgtctaggtatattcacaaggtcatttttcttaaaagttgaattgttccctctaaatgaaggcttattcaacctataggaataagtttttaaaagttgaattgttccctagcctgaagcaaatctctttcctgtttgaactctacaggaatgagcagtaatgaggcttgaaggtgatacagttatcgacttgaaattgtagtcggataaagtatttgattatttgcctccacatttgattcgtatatattagtttaacaaatacataattgaaagtgaaggatctgacctataactgacgcctaatggtaggcatttaaaggaatctgaaattgtaactaactttcttttgtacgaaagaattcaaatacataaatgtgcagatgcagcgaggctttttcagaaacaaatatgattcttactgttaaaatatcctctacctggcagacatctaaggaagtgtactcatttgaattctgattttgctttttctcagggttgtttcatgttctaaagagtgtcatctgcaatgcgatagctttagagagatgaaagtccaattatgctagattatcagtttttttgcaaggatgctagaatatcactttgacttgtttggtactgtccaatgccaatagtggcaatgaagacaactctttatacatcatcagaggaaatgctgactccattatttgtgatagaaaatgttaaacatggtggaagcaggggagtagaatgtggagcaaatataaatatattttgaagctaggcaggacatgagggtgctcatacaaagtgatttctgagagctcagattaattttctatctataaataaccatctccataaatggggtatatatatgtttttttaatagaagttttgcatacatttttttgtgcagtttctatactctagctagcgctggaatggtcctacttctttcatttacaacatatcagcttggtttcccatttggacttaaaactgtaaatatggcaagcatgtagataaagttgatcctacatgcatgccacaacttatcagacataccgtctgcatactctgattgtacattcatgtccatacaggggagtaagttcggtaaattcatcttagtgaacagaacatttgtgcatttcattcaattttttgttttgtggtgatgagaagactatgtcatttgttattcttctataagaaaataatttgttattcttgtgtaagaaaattgtttgttattcttctatctatactaatataaaaagcatgagtttaccctgcaatccaactggtgaaatcacctataccgtgtctaatccatcacccacgcaatccttgccgctccatcctcctggcgcaaacaatgccaccagccaccacgccctcctccctgaatgagcctcattactccagtatatgctcctccctattagcgccactccatcgctattcgttgcgttggtcgatcatcgttgccactcgctaagcgtctcgaccgctggttattgttgtggcgcaccgacagctttcaccatgacccccggccactggtcctcgctgcacgctgctgcatgatggccatggtggctctcgagtgtggagacgacagggcgaagggtggagtgatgtcgaggctagcggaatcaagcagatctagaggccacgtcgccggccggcctgtccgtcgccacctaggcgctcgcctctcagccctcccgcctttagctgctgccgcgtcgactgccaccttaggatttgaaggtggtgctctacaacagggacggcgccactgtgccaccatggtcatgatggccctggtccctggaggtcaggagggcagggaggagacctcgctccgtgaccccgacgccgccgccgccgccgccggttcctgcaccatcgtgggctcgcggcaatgtcgcccccttacatcttctgtgccgcgccatccatcaccattcaccacggtcactctgtttccatatctatgtccacggttcatttgggttctggtaagggagttcctactcatccgagtccacatttcggttcttcagttttgttccggtaaggcaatttctaattttcgttgactgccccgcttgctgatttcccttcctacttttcgtggacatcaggaagaggaggtccactgccatgtgtgtgagagcgacttgatctaatttttcatgcttgtggtgtacattgaaattttcttcacgattatcgtccttgctatgaaatgcttatgctaatgatttgattggtaatctttcgatatggattgatcactgaatactgatgcattggatccttggagtgaccgtacaatgctttgcatttctaatcgttgtcccctactttatacttcattcagttcatggtatatctcattaatcgagaagaaattgatatggtaccaaacgagataagacaaacaagttcttggactgtatgtggttacttttaaaagttagcattctaacaagtatgtttgtataactttttttcggttataatttccttttttatttgagtgaatgctcaggttataattttaatagtatattgttatctaaataaatgcggcgcgaaggtcatgaggtagttctgaaatttcagagaaatcttcgaagatttatatttggaaaattcataaacagagataatggcaaatccctggtttttgaccatggaactggagagtacatttatcaccaatgttgcattagagtttgttttcaatatctggaaattttcttattaattattggcaccgtgtacatgaagcttttattgttgaagtctcaattaacttcttactccattttgtgttccatggaatattcttctccttttcatccctgaagctaatttttgtgtcttctttttatcaggcgagtgaatgaattttcttttaattagaaaggttaccccctcccatttctactaaattaaactgatatgtttacagcacaagagtcatccaggctaacaacaagaaaacgaagaactgattttacttcttcataaacaggtgcagaaattagatagaaagataacacaatattaagattgctagaaaagagttctagtttgcatggagcaataacccttccagtccgtcagttccatattactgaatgtaaattatcggtaataagaaatatctcatagtttcttattaccgaatgctaatccattgatttaatttcagttctgggcttttgtcatcatgtataaacaaataataccttcgaggattttattgccttcttagttcaattttggtaatatatttctcccatgatgggaatcatgtccctttttacagcttacatcaagattcttaaactagactgttcattttacttctgcagattatttcactactttcttggttttatttcctgtcatcagattttacattcacatgtacaaatgaagtaatggttaccattatttttgcttgctctatatgtatgcacccatatggctttttactaaccaagccgtagtatactggtatctgatccggctagcttgatcctcatatccttccatacattatggcatttccgtttgccagccaatggagtgcgctcctttttgctctatcctttttttatataaagttttattgtgctcccctgtattttccaatattgtgattccttcaacagatccacacattgcttacgatacatgactttagtttttttgtctaaaacttgatgtgcgcttttcttttgcagtatttttgttgaagtcaaatttcaatggcaaatcaatttaaaccatcttatacttaaatggctgggaagttagctataagcaggtgatggagataattttgttgtagacataggattgagctcacttctgttgacatcaatataagcacacaaggttcaagaaagtttcagtaagaaaattgttttttagttcacaataacgatgtgttgatctcttttgagattgttgttgcaactccagtcccgtacatcacacgtagttaatagctcagttatttctgaattttgatactacttttagagctactgacctaaaaattcctaaatttataatatgattatgaatttcccatgatatattttatggaaaatgtgcattgcatgtgcacgcttactagtattgaacaaaattattttgtggtttacttagtaaccatgattcattgattccatccaagttcccgttaaaattttctcctttgtgcgcttacatagaaattgtgttgagaaatataaaaaaatgtatgccctttattatcatttgtactccaggttaatggtgtagatcctctggtcaaccatttccaccatcaccctctggatcaagcagttgtcatcctcaagattgccccacaactattgaggttgagttcgcatgtcgccactaccctcgagttcccccgctagctactatttctaaacgggtgagaatcctatatcataatgtcgctaccattacagtcattggtacacgggtctcaacttattattgccccacacgtcagtttctataatgatagtgttattatagtagaggatgtgaacccatcctaaatagtgacattgatacatcttcatcgctgtcactgtctccaaatccgacaaatgatatactagcagcagcgtaatggaactagagatggcaatggttccctagtccttggattccccgcggtgaatcctcccattaggaggagggggtggtataaaatatgtctccacggaacattaaatggagtaaaaacactctccatcgggtctggcgggggcgggtttggttcaccatccctcgtccccgctctccgtggaggtccgacgtaacaatgtatgtgtaatattatcatgtatatttggcccatctagcccatagaaactaggcccaaaacgtagagtatataaagtatctacaaaaccctagccattccaatcccttctccctttcgtccccattccccacgccgtcgcaggctcgtagcctagctagcggcgtgccggtgccgactcccgatctcaatctcgtagggccgccgcgcgcctgccgcgtcagcaccctcgcagggtcgccggcttgtcgtgctcgcgtccgcgcagggccgctgcgcctccaggtctcggcactgccgcaccaggtcccagcgccacagtcgtctcggtctctcggcagcactgaggacgccaaggacttggcaccggccaccagacgttgggctcatcctccactgtccatccatccattctgaatttctgatccgtcatctgggcttatttgttttactgatggtggatgcaggtgaaggctacggtggcaagaaagacctactccgaactatgtttttgtgtatgcctggacaacatgtgtagcggtgataactaatgagtgatcgactggtgattgattaatgatcatgtgttattgtgttgttgcttaatatgagaatttgatggatagtgttgctgaggggaaattcttgggtacaaatttgttgtactgcttgttgctgcaatgctgttgcaactgaataagtaataaactgatgatgtgcatttgtgaatttgtgaacttgtgatatgaatttgtgaacttgttttcttgtataattatgttgttgtcatgtgctgaaattgcatggccagaattgctattttgagtgataatctttttatcaaaattattgtttgatatgtgaaatatatacatgagactcgcggggatggaggctccacggaggcgatgatggtgaaagatgttaccccgttgcatttcacggtgatggtgataggggaaattctcctccaccgaggcgggtctggtggtgtaacctccgacggagaattccccgttgccatctctaaatggaacaagcatgctcggcccgatggatctgtacgtgctcaacgccaagcgcaccaaaggtcttaggctcgattgatattgatcacttacccaattaaatattaaatcacttattccttttatgtatgtaagcaagcatcagatagagccctggtacacgtgaaaacgcatgcagtggcagaggattcagggggatgacgaagaaagtggatggggagttgcgattgccaagatcattgatgccgttctcaatgtgggaaaacacataatagatatagggtgtgtttagttcacgttaaaattgaaagtttgattgaaattggaatgatgtgatggaaaaattgaaagtttgtgtgtgtaggaaagttttgatgtgatgtaaaagttgaaggtttgaagaaaaagttaggaactaaactaggccatatatgtaggtgttgatgaacttgactgcatgtattggcctgttcaagttcactgtcattggtgcatggagcatataaatacacgcgaaaacttttcattatatcagatcgtgaatatttggacacatgtatggagtattaaatatagataaaaaaaactaattacacagattacgtgtaaattgcgagacgaatcttttaagcctaattgctacataatttgataaagtagtgctaaagtaaacatttactaatgacggattaattatgtttaataaattcgtctcgcagtttacaggcgaaatttataatttattttgagtatacgtttaatacttctaatgtgttcccgtatatccaatatggcacgctaaaacttttcacccgtgaatctcctagcctaacttaaacactctcaaacagacatgtaattacagatgcacacatgctgtcacacatgcaagattagatcgatataatcaactttatccaattttaattgctccatcactagctagccattgtttacacgttccctccaataaatcgccatcgacttcactgctgccacttccgtcgccaccgactcagctgccgttgccaccgccgtcgtcgccacaactgtcatctttggtgccgccactatacgatgtcccagacaagacagtgagtttaagttcaactagcaataatcacgcgctacgctgcgtgtggatttgaaggtaacatcatactcaaagcagcccaaaatggttacagttgtcaagtttgcgccaagagcatacttgcatttacactttattaatattttcaagatcaaatgtgaattgttctgatcggttcgttcagagaacaatttgtacaaccaatgcacagtagtgtaaaagcctttccagtgtgatgtagattacagaaaaagatcaatgttgagtcggtaatcattagaaggcaaggcgcatacctgaaaatttttcatatagaaatcttcatcacgaaacaatgagatcttttcacatagcacctgcattgtgaaggatattttagtgtttcggcgcaataaaaacaacagtatataaccaaatgtatgtgcagcaatttagatgactgctgcttacttggaaagtgccagtgactactgagctatgtccaataggccaacattatgtccaagagttcggttttacatgcatgaagtggaaacaaaatgttgcaatttcgattgattaagcgcaaaaataactaatgaaatcataatgtcaagtcaacctatgatgcaaacttcatagaagtatatgtaaaaacagagattcaatttgaaagatgatgggtcagtagcaaattccagaaatatcgctgtaaggaaaaaaaagaaagaaagaccccatgtgcacctattgaagcatattttttttatatccatcatttagagacttatttagtatatctgacaattgtagttgctatgattaatcgaatttacggagactacctagatgagatggccaagagacttttagcatgatatgatatacttaccttaatcgtggccaaaagacttgaaacatgatatgatatagttgctctgaggtatggaggtatggctatttaaagttatttgcatgatccaaatataggggtaaaaggtgggggggggggggggggcagcaaatcagcagaaaaattatcatagatgggaaacataccagatggagcatgtggttgctgatttacattccatgccaaggaataaaagggaacatataatttataagtttgtattgtccacttgctatttaaattcagaatatgtagattattttaaagtaatgatattatctgaatatcctttttccagaatatgcagacacatttcaggtttataagcttgaaaaaaaaggcactaacgaacattccatcgttggtcaaagaatcccatcatagatcaactggcctaaaaaagaagaaaaataagtgtttcatgcatagaaagtggtttcaattttatatccatctgttggatattaagacaaaacttgaaggagaataactattccacattggttccagataattaattacatccttttcatgagaaagcaacaattaacaattacttttgttccccataacacattgggccagctgtacttcccaactatcatgaacaatttgtttaaacaaaaattagcaataaagcacatgggacattattcaaataccagtatgtccactatcattgtcagtaagttccaaacactgtcaatggattgtagttcctacactataagaactacctcatccaatatcctactatccccaactggttgtcaataactgtaagcctacctgaccatttgaaataaaatatttgatagttttggaacacaggtagctgcttaaatagtatatagtcttcaatatgaaatgtcacattttagcaatatgactatgcatgtagcatgttaagcatatttctcttatcaataactatttcaattctaaacaaaaactacaacatgagtatatgtttttctttattgcctaaattcacacacctcagatgagataccatacttcccaaaaatgcattagtgctcgtacagagagaacctagctagtatttcttagtatacctctagctaagaagaggaaccaaattaggcgacaaagactaatgcacctcgtgcaagctggtgtataataaaaaaaagtcccatggctacagcataggacaatctttgttaaaattccagttctaaataggttacaatgacttcgtatgatgttcaaaaaaagtaattgattcgtattgaggcaaaacaaaacttacatagatatgttccacttcatatgcactgggagggatacctgcatctagagaagcttataagcactgataaataaagaacagtagggcatttagggcatttatagtatggtctgaaaggctttgagttggatctgcactattatgtttcttgtgtacataatatgaactgaatcagcccaagaagaactttaccttggcaaccaaagagaatcattacatacatgtcaaaggtatcctaagcttgatataatgaacgaaagccccaaatcgcataaatatgccctgcatcacaaatgggaacaaataaacctatcaacaatatcgttttgccctccaaagttgtatatgcaattcctaactgaaacaattaatcacagcatagagaattttgagtagcagcgtgtgttgtttcaagctaaacagtttgatcacacatgacagtgttgaagtacatgcagagggaaatttctccacacaacctacacactataactgaataatgccatacacattaaaagcaaatcaagactggcactgtaactaaatcaaggcttacacattagaagcaaatcacggttgtaatcatcaacaactaaggtccaaccacttccttctcatggccctatgacactgagctagaacgaaaaggaaaaaagagaacaggaacgaccaggcagctattgtcgcggagccgcagctgtcttcatcgcggtcctggtcaagccgacactctcccttcccttctcatggcactgagcgaggctctcatggagagggagaggagaagatggcagtggcggcggccggagagggacaggagaagagggcagcggcggcaccctattgactccatccgggcgaccgattcaactggaggggaggccaagattgatgaatcagacggtccccgagccatatttgacaccgcagagagggagcggcggtggcagcacggtagaggagaagggagctgcggcggcgacggcgcttgcgagcggaggaggtgggcgtctgggcgccggatccgccggcgaggagaccggggtcaccggatccggcggtcccggcctcctcactaggagatccggcgggtcattgggagggagcggcggcggcagcacagtagaggagagggagctgcggcgacgacggcgcacgcgagcgcaagaggcgggcgaggttgcggtgcgagctgaggaggtgggcgacggcgcacgcgagcgcaggaggcgggcgaggttgcagagcgagcggaggaggttgcggcgcgcgtgtagggagaggagaggacgggcggctagggtttgtaccggttggcgaaatccaggccgtccgtccataatccgacgatcgcacgggtaaggaagggccagcacagcgggacacgtggacggccagattgaccctacggtgagatcggacggtggaaagaagcgaggaccggcgcataattatccgaaagtgcaggggttttttcgccaaaattgatgatgtggcactctactcttcccgcgttcccacggcttttaagtaaacctatatattaactatttagtattcggttaaccttatcttgagaggtagctacaaaattatggtgcaatacatctgttcaatactaatttagtacttcatccgtttcactttataaaacatctatttccttgtctaaatgcaacatctatatgaaattatgtgtccaaattcatatcgaaccatacatgaatctttttaaaatccaaaaattcttataatataaataattaattatcacactccgattaacgacaacttgctttcattaggccccctccaatatgagccaatcatgtattttcaccacgctttaggactttggcatagcatatgtgctggccacatggaagtgatgcaacagttaacaacgctttgctaagattagaataaggcaacattgaagtgattaatggggttgttctcagtactaactctgttttcttaggtttcgttcatggacggtagatatgttcaaagttcgtttctaattttctatgttgcttaatacttgtttctaaatcagctccaaactcttagtatatagcatagaataatgtgaaataccatgatgtatacaagtaattcaagaagctatttctgtgatatgaatgcagtccggccatcgaaaaaagcaagaagttccaaatgtatggataatatgcacacctttattgtatttcaatctatttaaatatgccaaccacttacacttaatttatttggataattatttttttcacatgtaaaattatgaaaaaattgatgtgagttggcatggaactgaatctcaatttaatttagacatatatacaaattaggcaaattttgctataggacatcacgacttcgtggttttagccgtaggacaccgcacaaactcacttttaggggaaaaaacactctttaaacgtgcttatttgccactggacaccacgtccattaaaatattaattttcggttgaatagaagagataaatagtatgaaaggtcaaaaatacccctgaccccacttgtcatattcttcctcttcctcctggttgtgcagcttctccccggactgttgccggtccaagtgcgtcggctggaacacgctcatggattccctgcctgctatgtcctgctcgtagtataggtccttgatcctctcggagtaggcgccatgtagcgacacgacgagcaccggcttgcgcctccccggccgcgccgcccggctgctctccggcagtggtaaagttgagctcctgctgcacacggggcaggatgttctctccatgcgcgcacaacatgatctggccgtagagctcgtcggtggagatgcgcgccaagtagaaggagcacacctggatgccgacacgctactcagtgtaggccatgtacgaggcatggtaccacgttcctcgggtggagcaggtagcggccgaggaggtggaacgcagcatcgtggcacgggaacatccgcggcagcacgcgctcgatgcgcgagaccaggaacagtccgagcacgaagtagttgtcggagaggagcaccatccagtcgacgcgccacaatgcgtccagcccgtcgtcgcagaagaagcgcggctcattgccgttgcggttgaagtacgtcgtgctgcaggtgcatgtacatccatggcggtagtgggtctcgggcagcgcgttgccgcgccgcagcgcgttgccgaggctctcgcgggtgcacgcgttgaagccccggatgccggaaaacgggaagtccccctccggtagtgtccacgttgagcccgggaattgctcgcagatgagataaggaagaagagaggatggggaagagaaaggaggggtaatttggttactctgcataaaaatatgggcccgtgtcgccttgtcagcacgaatacgttattttaataggggcagtatccgctggcaaataaccacatttagagagtgttttctcctaaaagtgagttcgtgcggtgtcctacaactaaaatcacgaaatcgcgatgtcctgtaacaaaatttgcctacaaattaacgccgatggcacaacagaaaaaagtaaatcactatttttattttatactcccccgtctaaaaaaacagacctagaactgtatgtgatacattctaatacaacaaatctggatagagttatgtcccagatttgtaataataggatgtgtcatatccagtgctagattggatttttatggaacggatggagtaactatgatatatgtttgtgctcgtgattttgcttttataattgtagtcgatcatctacggaactatttatgtgtgtatatgtagccattctatatctatatattagacactaccactcccctctctctctacgttatctcttttctcagccttcccggcttaccaccttttccccaccttcttccctgcttcccctcctctccaccgtcaacagcgggcgtcggtggcggccccgtgggtgcgcctccacgccacccgcagcacccaggatgaggaggtcaaggtcgacgccaccatgttcgacggcgccgccgtcccgcccccagacgcgcccctcttccgccgcgtcgagtcgctcgaccacgtcccgcgcctccacctcggcctcatcatcgaggcctctaccgcgacatgttgcaccagcaccagaaatcatgttgtacggaagcttttgtgattttgctctctggtttatgtggtttgtgaagttccacttctgtaaatgattcgcagcaagctggaggctagggagagggagtacgtgaggaaattcttgcaggagagggcggcggcggcagcggcggccgggcgaggcggcgctcccacgggagattcacgacgagatcggcctagagttcctcggcaacgtcaccggcaagccatacacgctccacgccaacatcttcgccaacggcgtcggcagccgcgagcagcagtcgtcgcatctcctcctggtcgtggtcctcatcgtgcacatcgtcgctcggctcccttgacgacgatgccgtcgttgcgtgcgtcgtcaaggcggcggcgagcgggcgagcgggcggcggccattttcactttttttttgttttttttccgtgcgagcggtataatatgaccgcatcgggataatcgattatcccgtgcggtccattatcccatacggttgggccgtccgtacgcgaaaatattgattttttcagacatttgggtatagacgggcaaatcctccgcacagaaaaatcattttgaccgcaaggaaaaatggttttcgcagtaacgagagaccgaagaagattgtacaattattaattgggtaatttgtaaccatgccattataattttttaaagtttaagatatgccatcggtatctcaatgacacgtaggacccacatgaatcaatgacatgtgggtcaggatggcatatctcaaattttacaaaattataatggcatggttacaattttcccttattaatttatgttcgcatcgcgtgcggtttgataagtgatttaactaggttccttgttttgtctaaagcaccaccaccagaatcatcagtatattttactgtggattttggagtacaattaaaaattctattacactgacttaaaatttgaatgacttttacctttttaaactctatggatgaaccctaaaaaaataattgccgaacaaaatattatttcaaactgggagatgatgtggcagttttttttaattttatacagtggatttttggagtacaattattttaccattggcaagatgagcatatattatttttttaaaactttaatttgttggatggatagtatgagtacattttatacaatctatatgttcttttatacaggctctgtgtacagctcagatgatgcacttttcctgtgtgaaactctgaagtatgattcatgtcaggcacgtttttttaggataatgtcacgtgcctcttttattttttgccacgtgtttgaaaattattttattttaggatttttattcatattaaaatggattgtccattttattttttttatatgtatgactatagtgtactttgagatatgtatgaatatgtgtagccattctatgaagctttttattcggtcattctatatctatataatgattaatttatgatgattaatttatgtgtgcatgcgtacagtttgataagtgattttggtattcgggccttggccgtatttagttcctccaaaatttttttgacaccacagacacacatttaaagtattaaacatagactaataaaacaaattacagattccacctataaactgcgagacgaatttattaagcctaattaatctatcattagcaaatatttactgtagcaccacattgtcaaattatagcgtaattaggctcaaaagattcgtctcgcaatttacatgcaaacaatgcaattgatttttttttcatccacatttaatgcttcatgcatgtgtccaaacatttgatgtgacggaatttttggaagtttgaagggaactaaacacaacccttatttagatcccaaaaaattttggccaaaaacgtcacatcaaatgtttggacaaatgcatggggcattaaatgtggaaaaaaaatcaattgcatagtttgcatgtaaattgcgagacgaatcttttgagcctaattatgccatgatttgacaatgtgatgctacagtaaatatttgctaatgacgaattaattagacttaataaattcatctcgcagttataggcggaatctgtaatttgttttgttattagtctacgtttaataatttaaatgtgtgtccgtatacttcaaaaactttgcacccaaacaactaaacacaccctcaggcaatataacttggttctttttttctctaatgcagcaccaccatagtcaactgtagagttatcccttggtatgtgaagtgatgatcagagccaatgtacctctcaaaccgactcacaaatggatatcatcattgttgaaagaagggtttcatcggggttttaaccgatgaggtatgtagatgttgcatcggcttacaaagattgcatataagttggatttagccattcgcaacaaaggtttcactgtttatctaatcttgtggattttatgacatgggacctccagccaatatatgctttaaccatcggaatatttattttatcatatcattgttagccgattagtttctactggattatattattgttatttatcatcatcggctgatggcctttatgtcatttatttactcaagtatcagactttgcattggacatatagccgattgctcaaaaccctatcaacatctgctggtatcggcatcagttggaattactccgtctgcttgtcagccaatcggctcattgatctactatttgcatatcttatcagttgcaggatcaaactgactgacacttctgcatctcatcaaccttttgacctgcactggagctaagtagatctcccatgccgttgggtttgttgacttaattttgcgccaacacagttctggcaccatcggccgagcgcggttttttcgtcaacagggggtaaaatgaaaaaaaaaggagatgctaaggtgcctattttttcctctcagggtgggatgaggatttgtggaaggattccttagaaaagaagtttcttgaagggtattgaaaatatttcgcaaactgaggaaataacggctagaagcatcggaacgaagaattgaacggctaaagttcccttaatgacgtggtgttgtattttgcaaggaaaggtttcacttttcacttatttagatataacacacatgcatgtattttcgtgcaactagtgacttgcaacacatgatccctgctagatgcctgttggcagtcattaaaccctaaaatcaccaccaatattataataaaaatatcacataaagcatgttacctaggtcgattttgccttatttcaatgagttacacgatttctgttggatttcactacgcgtataataattcacgattttgacctattttttttccaatgaaaatctggcattttaagccaaagggctgaccagccgaccaacatacctcatgggtcaaccggcctaaagacttggccgactagccaactcagggctcggccagctatttggaaacgtgtcctgattggccaccctcctcactgagccggctggcctgcgcagcacgatgtgaggctaatgattgattggtggaccccattctgggagtgatgtcttctcggatgagtaacatgtagacttacttttccctcttaatattttattcatacattatgcttattgccatactttttttcctagttctcttctaagtttattttttatgcttgcttgagtggatgcctcatttataattaagctgggaacatgtatagttctatgtgtgggtgtggtgcttaggaatagttttatctaggaaggctggttggggaaacagaggacgtagttggccgggtgccgacagcctcggttgtcctttgaagccagccacgttaaccctaattacgctgacgcaaataggtagaccaatgcttaatgtggaaagcagtcctgtttccaaagcaagcaaggataagtgtagctaaatggatttcctagaatgaaagcagtcttgtgatgtggggaataacccggggacttgaatcctgactaattcgatgatttcacaaccatatcatcacattcacacaacaaatacatatatatagacaataatgttcacatttctaagtgttaacaaaagacacacatcacattggactaactggtcaaataaaagagagtcaaacatagcgcaataagagaacaaaaaaatatatacattctttagtatgccatctaactaactaggaattactacccatgtcgaaacgcggatgaccgcaccgagaaggcaaattcttctttgccaatcgaagagcacaaacaagaatgagatagaatacaaccaaaattacagatgaatgattaagctcacaagttggggtcttacaaaccgatctagcggcgaaactattctcgacagaatattctaagcaaaacccgactctaaacgatgacggctacttaattaatatgattagggacgtcctagggttgccctagggcgcacaccctcatgggctaagcccacgacacaattataaggcccaaaacccaaatcagatttggattggatgagatacataacttgttttgtagattcccgacagctcggtaggaattttgacgtaggaccaaaaccatctaaaagtagactccataagctttccaacaagtactcataggccccgaaattccttctagatcaacatctaggttcgtttgaagttgatgctgtcaggaggcccgaatccgaatccaaaacgtgtagaacttgatctcttgtcttctatggaccaaaagtgacgtggtgaggtagaagtagacttggagaaggtcttggtttggtccccaatcaacttctttgatcatccatgcattcgttacgctcggtctcttttccttcgcccaagcaagtacctctacaaacaaaaacacatcattgtgtagcaacgtttgttcaaatatataacaagtaaatctaatgtagaacatatgtacctttgtttgattaatatataaggtatccatggttatatccaaactagtagtgtcctcatcacctagctagaagtatcatgacgctaatggtggtggatagaaaatggcaaaggaagggagatagtgctgtttccaaaggcagagatgaagtaaaatagggttcaatgtaaaacaaaagggagagagagagagagctcaaagtgaaaagaatgtgtaaaggagggcaaaagtgaaacttttgtagtaaagaggtccacattgcaaaccatctctatgttttaagttttgatgcatgtaaaaataatgtgactgtgacatcccggcccaatttggattaggcctgtgtggcccatgtgagttgtgtgcgtatgtttagtacgaccttattagtttagcatgagtggaactaacttataaggcctcttccctccaaccatacccttttacacgaagcgaggacgaaagtgtaagtggagtgatgtgtgtaagtgggcccgctacgtggttctggagggagggctgtaacaaatggtatcggagccgacccttgcgattgcgcgtacgggtcagtgtgcgggcatatggcgctggcactggacgtacggatgtgcgcttcgcggttgcgcgtacaggtcagtgtgcgggcatatggcgcatggcgcatgtgggctctgtgtgaggcacatggcatggcatatggcgctagcactggacgtacggatgtgcgctgagagggggtgtgttcctggacagttgcctatatgcctgtgtggctacatgggtaagttgggccgacagggatgtcgggtcctttgaggggggggggggttgtgacatcccagcccaatttggattaggcctgtgtggccccactcccgggttaacccttttatacgaagcgatgacggaagtgtaagtggagtggtatgtgtaagtgggcccgcccgtcggatgggctggctacacggttctgtagggagggctgtgacagtgacgtggtcatcacttccaacttaaatgctaaaaatattgttctcaatttgtaacctccattgagagtattatcatgttcttagtaattgcttattgatatttttatggaaaaagaggtgtaggcaatcttcttcacattattcattacagtaagatcgttacacatttagtttacttctcgttgatctgccactcagcatactgttgcggcccacgcctcggagcaaagacagccatctcatcgccgcggttgaactttacatgcctagagtcctcccttgaaagcctataagcattggcgaccacgtcaacgggtagagcacgaagaatggaggccttccctgcgatctgactgtcgacagcattgtgattggtcttgaaggatacccatgcaaatccttcacgtcgagccttcaccaccactgcaaagttctgtgggatcaacaagatctgctgttggtgaagctcaccatcaaagacactcctaccacggtgatccaccacctggatgtgcccttggccagcggtcacgtacatcaccgtgtgtgcgtttaccgtccaatgaggagtaagcaaggcattctacaaaaatggaagtgaatcaacatgacaaatacttggcataaactacatacattatgcttacaaactatagtaattttctctttgtttatactcacattttggagaacgattctggtggcactcatctggatgatattgagtattgggaaattctggctattggcccttgtgatccttccaccatgggggttaaatatgtcactggattgtgggttgtctatgttcttcctcaacttaaatgcacacataatttcatctaggacattttgctggccgcaagctccaccacttcgcaaccaggtgggctgtagctgcttggttggcaagtaagcttgggtttgttcctctttcactggctcaacttggagagagggctgcagtgcctggagcccattttcaactctaatgatggcacctcttgggtcactcaggccttggagcctcaacacagtttgcttgctcacactcagggcttcagaaagtaaatctgggctgaacccagcaaagatgttctgatttctgctcagttgttctgtctggtatgagtacgattgctgctgccagctacttctaggctttccagccaagaaaaactcctaacccatttatcatttcatagtatacaatacacattagcattttgttatcattgaaatcaaaatagtgatatggaatattcattatgcttgtgtggagcatatgtacgcatacccttcttttaggatcgagctggttggcattgttgctggtgtcgatgacagtgaaagcaaccacaggagaatcaccattgttatatagccagtgggctactccagctggcactgcgattacatcaccttggtggaattggtgaagttgctggtgctcgtctctcattttttggattgatgattgagcctcaccagctgttgccacctcttgctcaaagggagacctaactgactggaacgtctctggacaaccaggcagtgccatcccaaacactccccgacctgcaatatatccactcaattaaaaaaaccccacatattatcaattaaaaataaaagaaaatagctaccatttacaattgttcacaatatattggagcttgctcaaacaatatacagaccttggacgatgtagacaagcttgtgagcattagcatacattggtaaaactaagcccttgctctcgacgactaagcgcctcacgctcactccggcacaacggaactcatttcttgcctcaatgttgtagtactcagtgaatccagcttcagatctctgctggtgtgttgcctcaagggcggtgaggtgctcaaaacgacattgatgacgactatcttggtctcccctaaatccacgtgggctctgaagtgggcttcccccaaatgaaaattgtgccatggacacttggaagaagagaaggaggccaaggcacaatggaagaatggtagacatggaagccatagttattcacttagtttcccactgctcttggtgatggatggacgagttggaggagaggggcttatatacacggagtagacgagaatatatgcaaaaagggataacaaacttacctaatctctttatcatgctgatgtgtttatagcctaaaggaatatctagtttgtctgttgcaaacaagatgatgcaaaaagggcataggtaaaaacttgtaagtcattatatgcttgattgatcattaaacacatagataccattgttttaaagttggaaaagtgttttttttgttagagtgaagcaagagttatgccatgttttcttgctatcgcacataggaatgctgaaaaagattttgtattagtgccacccaagaaaataaagacatgcttttaaaggtgagagttagggatttgccttgtgattacgtggtatgactagaggacaataggttattggtagtgtagctacaaaaagagaaaacaaactacactaaattcacaatcaggctagcataagattgcactctagaaacgtacatgtacattgcttgtgagatcatgacaaaaacataacaacaaaattcactttttgttagagtgccgtgagagagtgtctgaccataatagacacatttaggttaagtgttcaaaactaatttggggttaagctagtgcacactagggaaataaaatagactaacaaaaacataggtgaatattaaattatagcccaaaataaatgagttacgagtaactattaaactttaatagaccagcagaaatattggtgaatatttcattatagcccaaattaaacgacattttagacatgcaatcagcagcaaggtaagctagacactataaaactcctcttcagctatggacaaacttctcttcttcaacctctctcaaaaaaagaacttctcttcttcaatatatttgagatgtatatcacaagggtaagtacttgaagtactcaacaacttatgtacatggatccaattatataaatggatgtctaccctaccaagtttgagttttttccgcacaaagccacatttgctcaaaggggtagtgttaagcaaagataatttacaaaaaggatttggaatggtagttcaaaagtgttgcttttgtatgcatgatgaaactatccaacacattttctttgagtgccatgtttgctaaatttctatggagagtagtctttatctcatttgggttacaaaggccacatagttttgttcatatatttggaaattggctagttgacatggactcccagacaaagaaacatattctaacaggcaggggctgatgcaagataaaaaatgactggtggcatgcatctataactcataacaagttagaaagctaagtgaaactcacctcattgcagcttataaaaactttgagatattacattatcttaaatagtaatatatagatatgccttccaaataatgttattgcctgtaaagacaacataaagttagcacaagccatataaatattactaaatggtaaatatagatagggcatacagtgcatcctttccacggtgatacttagtgattgtgtccgacatatccttttctacaaagcaaatgaggctatggctgagatacttgtcatccatcttgttgcacaaagcattcttcacaaccttcattgttgagaaacacctatccgcagttgcagaggcaataggagagcaagagataattttaaaagatgataaaccaatggataggagagatgattccttgtatctacctgttggtatttgatacggtcacagataaatccgcaagcgcacggataccgctgtagcacttcaccttagagtattccaagggtatctaatcgcagggaacgtgtatgtatatgtaggaatataattatatccaagcacaactactggtaggttcagtctagagatgattcctatgggttaatttactaacttatgttaaatgtaaagcctcatggattgcttcgagcaccggctctcccctagtctgccaagctaagtctagcctgtagctctatgatatacccgaacatggagggatacaaaggacggacgggactgtcaccaccttcctcctacctcactttccatggagcacactacatatgaagataaccgctgacctagacaccacgcttatgttattgattactactctagcctcgtgaataaactttcttatttatccagagtcctagtgctagagcgcttaataataatactaagtgacaaacctgcaacgatgggaatatatctgacttaagcaagtaaattaaataccaaaaataaatcttgaacacttactttattaaagaagcatccaccgaggtacaagagaggaaagagtgtctacagctcctgcactccttcggacctacccctcactctctacctattttctccactaactaaagtgatgcctaaaatatgaaagtgagttgtactccactttgttgtatgtttgagagtgacttgagctcctccttttatctggacatatgatggttgtggaggtcggttcacccacaaccgccatcaacatctaatgagaggccgccaaccttggttcggccgaaccaggcaaaccgcctctggccaccaaccttctctagtgcatgataggtgagcccctatgacggttagtgctggattagctcaattttagtcagttttgactgacatttggccccccaatccttgtgctcatgtatgattggtcggaggttcatcgtcgcttggcgggtttgttttcatctatatatcaccggcatacatatatttaccaatactagtggaaatggttagtaataatcccctaccactaagtttggtagtatattctgtattctaccatgaacttttcaagtgtctatcatgtcatcttgggtgattgaagaatggaacggcctttattccgatcgcctttacctccctctaatgaattatcttagttttttctttttatcataaaacataacttttttactttactcctaaattgagtctctcataccgtcattgtgtttaattctcgtcaaggcatttgatgttgccttttcttatcctacctttctaataaggattatgtagagctcagggtagggaataagaataacatacttgcatcaaatattttgtaaagtcaaaaggtagatccaaggagactaatagacatacaattatgatcaagatgtgcatgtgtgtggaaagggatgtgtatgtggaaaggtggaaaatgggatgatatcattttctatatgatcctcctccttatactttatttggagaacatggctatgttctatatcttttttttcatcatgctagagaatattttttcttctcttgtgagcattttgattttctaacatcatcatttttttagctcatctcatttggcatggatagtaggatggagaatcataatcatgttgggtttttatttggtgaatgaatgatggttgatgctgatttccagagaagatgtatatcatgtgatggtggatggaatattttgctgaacctccagtgtagagggagagcaatatatggtggatatgtgcacatggtgatgatcatgaaagtacgaaaagaatctaaaaagagactcaaccatttgaccaaactgaaaatgataacaagcagcatatgttttaaggtttatcaataagatcgatatatggctttggtaggaacaaaacatcgatgaggagtacataaatttatactgttttcattttataatattcccaaggactcaatagaagaaaacaagggtcatattagcaaataatctctcattcatcagtcacttagatgacatgtgtttctaatgatatgttcatcagtcacttagcaaataatctctcattcatatgttcacaagcacacggtaatatgcaaggaacatagagtatgcaagacatttttagttaagtcataaactctagctaaattattcgggcacattttaaaagttgagtttaattttcagatatgtttcatggtacggattatcaaactcaaaatttagagagatgagaggataaacatgcaaaacatcgtgtagtgagtgtggcgacgagcaacactatgtctaaagatttccatgcacgaagagtttcacccaagagttgaagagcaatactatgtctcctgcctcaaattccttcaccatgactcgcctatcatgccatctttttgttctttccttatacattttggcatcgtgataggctttatccctcaattcctccatctataatagctacaactatctatgatgtctggcttctcctaggtcaatattccatgtccgggtggcccagtgtgctctgtgctccagctcgaccggtaaatgatatgtttttccatatacgagctggtaaggtgacatgcctttaggtgtcttgtatgcggtcctatatgcccaaaatgcatagtgtagtttgttcttccatgccttccccatctcatgtatggtattctgcgaaatgttcttgatctatttgttgaatgtttctgcttgaccacttgtctggggatggtatggggttgcaatgttgtgctacgccccaagctcatgtaaaaagttttggaatgtcttattaatgaagtgagaccctttttcacttattaccatccgcggtgttccaaaccgaggaaggatgacctcgtggaacatcttgctagcgtgcttggcgtcggtggagcagcatgacattgcttacacacacttggacacataatagccactaggatgtactcgcaataatggacttagggaatggtcccatgtaaacgatgatccatgcatcaaatagttccacttgaatattgtatgttaagggcatcacatcgtgaatagtgatacctccgtgcttctagcatcctgcacatctttaaatgaattcttttatatcttcatacatggtgggcctgaagaatgcactccgccagatctctgcttgcacgcgaaatgcaccacaatggccttcatatggtgatgcatggaatttttcaatgatctggatgctttttgctgtcggtacatatcttttgagtagtttgtctgaatagactcggtataagtacggttcgtccaacatagactcggtataagtacggttcgtcccacaagtgccttctgctatcatagatgatgcaccttttgttctccccagtggtacataccatgcaaccataaagttcacaatatttgcacaccagggttgcgagtatgttactttggtaacatgccatcccgtagaaaatcatttatttgctgttcatgcatgttagtacttagcatatgcgacaaatgaactgctacgtaattttctactccaaatttatctttaatttcaagatcaaattattaaagtaggagaacccatctaataagccaaggttttgaatctttcttagtgagcaagtattttaatacagcatgatcagtgtaaacaataaccttagctccatctaaataagatctgaacttgtcaactgcaaaaaaaaagggccaggagctccttctcagttgtggtataatttaattgagctcctattagcgttttaatagcatacgcgatagcatggtgtttttatctttagtttagctgagaacgacacctacaacataatcactagcattgcacatgatttcaaacgacaatgaccaatcagggggttgaatcattggtgctgaaatgagtgcttcttttaagatactggtgaacgtgcacgtgcaaagcacattgacatatacgattgaagaaaaatacattcattgctaatgtacatctacatatactcacaaattaaagctcatagtcattgataaaaataaaagtattgtaaacattgtcttggtaattcattgaataaaactaatttgttattgtattacaacgtaacaattgtttttcagtgagaaacttattttcattatatttatgttactttatgccatggattacacagataatggttaagcctgtaagagttcaactattatgagaacaaacgacgatagctaactcatcaaaaagcgagatagcagtcatatattatcaaaagctagtaaatgtacaaatacagcttagaatagatcagtgaatcagcagtgaatgtttcccaattttcctctttcatagtctgaagagcattaaatagtttgatttggatatataaacatgtacatgagattttaatgagctaattttccacacatttagcagggtaaactcgggccaaaataataattatgattgaaacaaaacttctctaaattgttttctttgggcaaaaaacaaaattcggtttgaacatatcataaagctcacagaaaactaaactgcaaaatcagtacctgcaaagtttaggcgcatatattgtgctgcatttgaagttactttattatgtatagatagacattattctgtcatttgagatttgtaacaacatgattgggcatgatgatctacatagaaaaattccaatggaaagataagtacaaacactattatgccatatgtattaatcatatctattgcgcaccaccatgaggtcccggactgaatggtatatcatcacttcattacacccttactatccttgattttggcaccagaacaggtcacagggcgagatagatttttttatttgaatgagtctgtgtcatacaacataagactgtaaaagggcaaaatttaattgctgggtaggttcaactcgagaagcataaagttagtacatattatgcatagattatacaccgcaacagaataaagaggttgcagtagaggattggaggaaaaaaatctgtagagatcaaatagtgcttttggctcattaagcaacaaaatcagttcattatgtatttggctcaattacaatcggataagtttattatcttttgaggtagtcatagaaatattctaccaaaaaataagcagttttcagcgatcattatctatataataatgcaagcatctacagatctaactacaaacgaaaaatttctctcatgcgtttcattagcaattttaaatttagattctattaacaatgcctaactggtgaaaataaggtacctttaaatttttgaagctacttatttaaaagctaggatcgatccaaatctcaagcccaacaaaccatttagacttacaccatgcaggcagggcaccatgcagaaaaaacacgtcaaattttgtaaggaatataaatgaatcagagaggaatgatgatagcttgactcaccagaggctatgatggcagaccaaccggagagcgaatgggcgataagagatgttttctcctccctctcatgaccagaataaataggagcctggtagatttccaaatttcaatggcagtcgtagggaagaaaccaccacccaatctatcgcagtagagtaaggaggcgataatattagcagcaacaatgcagcggatacagacaaacgtcgtttatcaaatcgacactaaagacaaatgaagttgatgaaatcgatgagtcaggtgatgtgaagttgactaacaaaccaagagataagctttcatggagatggattcatcaagataaacatctccaactacctgaatgaattccatggagatggaagcataagaggtatgcttacatttcacaaaataattctatagaaatctgaaatggatgttataccagtgacttgtatatacctgcattcgtttatcagcactactcttttgcctcagtccattgacctcaacctccacaacctgagaaatgaatgtattgaagaaataattgttttccgaacagtagtatatcacatctaaagaaaaggaaagcgaggcagacctagtagcaggagatgtgagagttacctctgatcggctgacaagctggtgatagaagggcacggtgaggacgtgaggttggcattgatcatcaggcccagcgtgctggtgggaagagcctcttgaactgctcctgcgctgcagaggaagcatggagaggtgcaccttgcggaagtccttctgctactgctcgtgtggagccaccaacattgttctccaatgtagactaagacaaaatatatcagcagtccttactacaaaaaaaataatcaacggatgtataaacattttggtggtcggttctgattttgaaattatctgggtaaaaatatgtaacctatatcaagtcaatttgaacatataaaagtaaaatcagaaacaatacttggagttgagaaagatcaaaggcagtttagtgaattgaggatatgtgcgcgcttctcaaatttgagcatgacgacctagattatccatcagattaatcagataggtaaatctcactgagttcattcaaatctggacagtttatgacctgcaagaaattaatatctcaatgaacttgcaatggttaatcaatttaactgaaaatacttgtagtagcaggttgtgttatcaattttgttagggaagaaagatctgatagccatagcgttgaaaggcttgaagagcttatactaacaaaactgagattgccgcagccatccatctaatttgagaactggtagaaatcatttatctgagacaaatatatttagctcatccctgtgttgacaatcactgaagtcaattaagagagcactcaagacttaaaatgcagattgaactgattagggggagaatagttagtacctggtttagactttagagggatgtcgtcatgtcgtcttcagcgagcgaggtcattccagtggactatggcgtggtacggcaaggcggcgagggcaggacggagctgaaggagcaggcgagacggtgtcggcgcaaatagatcccccctctccttcctctccatcgcgtcgcgagtagggaactaaggacaccggctgttcggcccgcgcgcgaggaggcggtgcggcagggtgggcagatcccgtctctccttcctctctgtcccagtgtgagcagggaagcaagaggccgaacagccggggtagggcgaggtggctccggcgggcgcgcgcaagtcggcggcggtggcgcgaagggcaaacggcggcgacggcgcgaggagtagacagcggcggctccatgcggcagggcgaacgggatgagattgtgaagaggtggaggagggagtggggaaccggcgggcgtgcacaaggaggctgcggggtagggcgcgtggttccagcgggcgtgcagtcggagccggcggcggcggccggctgtcctgcgggcgcgcgcaggaggcggcgaggggaggtggggaggaggcgaggcggcggaaggaggaggaggaggcgcggtggcagaaggcggagaaggcgtaggaggaggaggcgcgggcggtctgggcgacgatttccttttttttccgatttggcgaagagagggattgagaagcgctaatcgcggggttaatccggcgcagattgcaatcgcggtgttaattgcactaaacaactcgtgctttttatattagtctagattaatagattttaaacaatcatcatgaaagttaaagagaacattcttagctaacaagctagttaggggtctagcgactaaagagaaatttttaatgaaccaacggtagaaccccgcatgaccctaaaagctacgaactcctttaacattggtgagaggtgaaagctattaaactacttcaatttttttttgctctatctacctcaactcccctttcggagactcagtcctaggactataccttcacggaccatgaagtgtcacgtttcccaattaagtaccaagccctcctcttgacatcattgcaagactttgtctattttttataaacaatgatcggaggtttttccattgatgaaaaaaatcatccatgaaaatattcatgatttccttgatcatgtcagagaaaaaaacatcatgctctattggaatgacgcgggtgcgttactgttgacggtcgttattgatcagtttcgcccgtcaatattaccaacataacggagactaagttatgcgtgcaacgcatattatctcaaaataagatatattccactagcactaggctttctaacctcttgcagcgaataaacataaattgaaggcgatttgacagcaaaatggacgatcaatcaatcgggcgctgtcgagaatcagacttatagaaggatgggccaataactcagaaatgacatgaccaaattgggccaaaatttacaagtctgcggagagtagcaaaagaggaggccacctgccagatttgggccaggccggcctagcccatggttgggctgaacccaccgcggctccgttcaatgcaggttttgatggacggtctggattgctcccctatggcggttggagggtattaccgacctttccaactgccataaccgtctttctcaagctatataaagccctctcatcctccatttcaagacacacctcaagcatgaagcttcatacattctctcaagtttagtatagggcacgtttggatcctaggctagcaacttcctctccttgctaggctaggctggtcatttggtaactactttaaaaactagctttgcttagcaaactagcctgccttggctagaaaatctttgaccgtcaaggagagccaaaatggctctccttcatcggcaagctcctgaacaagcaaccttgctttggtgggctatagtctggttgagctaggctagttgagcaaaaactatctagagatccaaatgtgcccatagtctctagagtatactggaatagaaatagaaatagaatcttcagtcctcggagtcttcgaaagttcttcaggtatggctctagtagcttttccttcttttgtaagacttgtactatttatagaatattcttctcaatatatttacggtactttacttcattctgattattcgagtactgactttccgatatattattcgagatataattgtctagctagcttactcgggagatgcaatggtgtaggtataatgttcatttacatgaatgctctatgtcatgacgataattatagagtagtatttggtagcataagcgaggtgtttaggctattgaatatcattatttggggttatatgctgcggatacgtcgaggtgggccactgattatgacagcttagtatggatattcctctacgcgtgtatataatcctaagttactttcctagggagggtactcctccgtatttagccccggttagatggccatgactggttgtcgtaaggaactcggcaatcaggagtggtctctcgaaacaccaagagggcatcgtaaggggggtattggctgtataattgtatagtagataagattgactaaagtatatgtatgtatattagaagtataggaaatgactctattcttattctttccacttagcctaaattaatatgtatgagaattgtgaatgcttctgcttagtgtcaccctacccttttgaattgaactaacccctgcttagactttgattattacaagtaacatataaatattagcttggttatctctattataatctttccacgggattaaacaaataagatacccttgaaatactcttgggtgaaatgctacaattgtatatccgtgctcttgcggatgaaatatgtaaccataatgtaccaagagtgtttctgtgccattgctaggaattatatttctagtaatgtcattaagaaataccaacagttacacagcctgaacaacatccgtcggtaagcatacattccacaaggacacatgaacgttgtcttgcttttatcattggaatggatgggaattcgatgatagctagaatagccataaaggaaacggaaaaatgagtgattcaccagcaactctagcatatcatcaatgaagggcatggggaagtggtcgttcctagtaggggtgtgatcgagttttcaatgaccgtcatacctcccggaacaacttggactgggctaacccactcactatatgggatgggataaattatcccgacatgtgttggtatttcttaacaacattactagaaatataatttcccaacaatggcgctagaaatgatcctggtatataatgtttatatgccacttgtatgatcagagtctaagcaggggttaatatatttataagggtagagtgacacaaagcaaagaactcatatctctcattaatcaatcctacgctatgtggaagaagaaatagaaaagcaatcaattcctatacttctagtatgcactcaatcttagtttatatctgttagtatacagctatgtagcgaataccccctaatagtgtcctcccggtgtttcgagagaccacctcgggttgtcgagttccttacgacaacccatcatgaccgtccaatcggggctaaatacggaggagtaccctcccaaagaaaatttcttacgaatatatactatcgtggaggaatactcatactgagctgtcaccatcagcaacccacctcgactgaaccgtagcatatatgcctagatagtgatacttaatattctagacaccacgtctacattattaaatactactctatatcccccgagatgacatagagcaaccgagtaatcggatactaaacccacactattgcacctctctggtgggctaactacacaattataccgatacaaatataaagtaaagccgatactcaaataaactaaagtaccgagagtatataaagaataacatttcattacttccgaaagtcttacaaaagaataagaaatagctactagagccatacccgaattccttcgaagactccgaggactccgagagctattctattctactccacttagcactagaatactaaactaaagtatagggagaaatgttgagcttgcttgggtgtgttgagaatgaattgagctcctccttatataggcaggtatgacggtcataactgatgctaattgtctgaaatgcctcgcaactgccttcaacaagtgatcctggacgtccacgtgtaaggccagcctaagccagcgctgccagggttcctgggctggcccagcaggcctccaaactttcccaggtcactgacaggtgggtccctatgatggttgtgacagttatggcggtttccgggacatgtgggcccatcttatccttaagcttgcttaggagtgaaatgtcttcatttcttctccatttatgtattaatatctgcaaataaataatattctaggtacaagtggaaatagattattctaaaacaaatatgaattacaagcatagctagttctctgttattttagttatattgacggtcgaaattggtctataacgaccgtcaacagcatgttggagtttcaacacttttattttcacgacttttctgttggtggctgttaaataccaattttatgctgccaatacctggataaacagaagaaataaaacatccaacatagtgaaagggtttaattctaacatattccatgagtgttggtgtatatttgagtgcaggtaatagaccaccaaagttgggatgaaatccagacttatgtaaaggaagaatcctatccatacaaagagtaggccttgagttacatcaaaacatcatcaaatgggccaaatgcacgagaaatggataaggcagagcaaggaggagaaccagaccagatttgggggcaacctggcccagcctaggttcgaccgtggtgatcgccgttggatccaggttttcgtatggatgctccagatgctctccggatggcggttgcggggcattttggaaatttcgcgttttccaaccgccattaccggcctatataaggacatcacttcatcacttatcacacacactccaagcttgagctgaattataagaggctctattgtactttattgtatactagaatgagggagagagtagagtagagaaagtcggaggaattccagagttgtcggtaatcgtcttcttatttcttttactctgttaattactctactttaatagaaatatcattccgagcaattaagatttattcggtgagatttatctcttggttagttcctaattagcgcgcaggatcattgatcactataatccagtaaaaatagtggttgctttagtgtttagctaacgctaaagtagttattagctgcgtagacgtggtgtctgggtagttaatttctggtggtttcttcgtatcccacagaatgtttgaggtgggtgtagaggtggtgacaaccctcaattacactgaagtcctccctgtctgggtacgtaatagagtcatatctggtagcagtgggctagccagtgcccgaagtgtcgtgttaggattaaattgggctttccctagacactgtctctcactagtaaatcctctctacccttagcctatcttaacttcgtgtccttggatgaacctggagaagagctgacacacaagttccatatggaaattgataccttggaatactcccgggtgaagtgctacatcagtatcttccgtgcacttgcggattttatctgtaacattaagaaataccaacactctctcatggcattatttagtcttcattgtggctctcgagagggcgcacaagaaggatctaaaggaatgcgatgagtatagtgagttgccttgaatagagcgatgtttttctaacacggctgtggatttggaggtcttggcatcggaaagcttgtcccttatgatgacagccaactccatatcaccgtgcaagaagtcacagaaaaggtgtcacacccggagtttccccttttccgtagtttccaattcaccaataaattgtctatagaacttactttcgttaaccaggagaaaaccttaattaataatgtatttgataattggaaatgtcagggagaatctttttcgagttctctttgctctaaaatcattaataggacttaaagctgaatattcagagcatcggagttaatgtttttaatttaaattgtcaagatttgaatgaataataacctttctctcctgcctttggtcatgaatcgtgcccgattcactcctttcttcgtccgcggtttcattttgcatgatgagccgagtccgaatccgttcgcgggtccgtttccgttcttttcctaaaatggcaccgcatttcttttccaatttgggaaagtccttatcctaatccttttcctatttttcctcccctcctcccactcggccgctgctccccctctctccctgcgcgcgtgcctcccctccccctgtgtccgagtcggcctcctccccctctcccttttgccgactccagccccactagtcccacctccctctattttttcccctctccaatataagttagaacaccccttttttcctattcaattttatttgtccctagccctagccaccgccgtccgccctagccccaccgtcgccgttgccgcgccggtgccgcagcctcctgccagcgccgtcgtcgccattacatcttctgtaatccgttttccctctctgtgccatggctaccgccattatctatctctattctaatttatctccgtcctaggttttgatttggcgtcgccgtcatctccgcgtgttgctgctggaccgtcgtcgtcgtctcctcgccgatcatctcagtttggtgaggaacctatccataatctcctggtttaggtgttaatttttttagcatcgttgtcgtaaccctaattgtttagtcctgctaaaccctagtgtcgttgcaccgccgccaccctagccgccacgccgctgccctagccgccgctgctgtgcgcctagccgccgccaagccgagccaccgcagccgccaccttagccgtcgccaccgccgctcttccgcgtcgtcatcatggtttgtcgctaccagtagctcggtagccgagtcgcaaagccgtaggtgcatccctaatctcctaccggcctatcgttttccataccaagtctcagtcgtaaactgtatatagtttaccgatttagccatagtcattctgagccgccggttccgttcgccagttcggttgaccgtttggatggtcccatgtcacgaagtattcgcttgttgagtcgttaattcgtgaggcttgcttaccgaaggtatatttccattgatctatttatctatgggcaataatatgtaataaatgattagggtttttgggttattagtaataacgcgattcatattgtaaaattcacaactaaataatttgagctccgttttaacccattcaagttgcagtgaatttgttaaaatgtatagaatccattaaaattggtttcttttgctctttcagtagccttgttgcttgtatttcttgtatgctttgtttatcgtttatattccatcagttccggtgatccagtttatttcgaagtggttgccgaggttcagtcaactcaagagcaaggcaagtcatacatacaacattgatcatgttgaatctattttacaaatcccctgctttctattaaattgcattgttttagaatgtcatgtgggatggatgcctatcatactgagcctgttgaatatcttatgccattaataacttgggatataattgattagatgattggtttaggaatgcttagctatgcttagatcaattagctcacaatgggattcattataatttagtccttaattatattatgatgtaccaccatggttatggtttaattaaactaaaatatgctttaatggtgggctataggtacatgcatgattttggaagttgtgcccatgacaattaaggaccggttctcgggaatccctggaagatatactcgtacttaccctaggccagcgtgggctctaggctgaatctagattataacttaacctagctgacataccatggcaagggtagagacgatggtgcagtttggacctggatattggtctctgttgtttccggatttacctaggcacgagaggggactgcccaacttggaataagtagggggtgaaacttgaggtgggtatgttcggttagggagagttataggaagggttttgtctcgatatccccctttgcagcatcgtggtggtatttcggggcatggtaacatgtgcggaatcgtgtcttgtgagtaaagttgtacacctctgatcagagttaaaactattcgaatagccgtgcccacggttattgggtggccaaccagctcaccgtgattagtcctactataataatttgacttatagaactagtgtagtttaggtagtttggttgggcgtgttgcaacgtagatttaacgttgtacagtgatgatttaatactgcttaactatatactattttacttattcaaaatatgatttataaatacttcttttattgcaaatatttaatgagccattcctttgagaataccttgcatcataccttcctgttggtatgacttgttgagtacggtggttggtactcagtcttgctttatcccccccccccgagaagcagagattggttcagatggtgagttctatgaggattgagcttgttccagacgtcgaggattgcatgtggtttatggaggaagcttcgctttggtcatgaagattaagtctagtttatttgtttttccgctgcttttgtgagttttattttattatttttgtaagacgtggaactgtttatcaaattgtcgtttgtgtactatggctggtcctggatagagatttattacatattctgcttgaaattcgggttagcgaatttctggacgtgacaaaaggcctgaaggaagaggtttgagcttaaccagaggttgagaaggcgaattagttttgggtaactcaatcacctctctaggatcgtcctcctcgacgaatgcactggcatcatcttcgaggagggattcgggggacacaaatggagagatagccaacaattcctcaattggctcgaaatcgggaatggattgcatcaaagaattttttgatctcaagatcgggacggaaaacataatttccccgagtttgatctcaaggactccagtatgctacgcctcaaggagaagtttatctatggtttgggctatgagaagatcaaagtcagagacatcgaaaaaatggaagtctaggatatctttgacataattgtgccggatcggcacactgtgtagaatcccataaccttcgataataggactagatgagctccgaaggttttgtctattggtgccaattgttcatcccctaaacattttattgcaaaggtaatgtttgcaccaacagtgggattataaagagttcgccccatggcctctatcgtgagacatgaaatagttaaggatggagagctaatctgaattacttcagaagaaagcttcagctcccttaacaactcatcacttatgatggtagttaattcatgcaccgtctctttgaggagattctcctcgagtggtgtggtagaactatgcgttaccggtggtctcttttggcaggaatagttcgaggtgtttccataatcttcaaaagataacccttaaactggaatggaaattctaaaggctgaatttcatctaccttcggttcccaaggttcaggtgaggattcaacgggtgaatcatgggatgtggaggttattttctccaattcaccatgtagttttctcacggtaagggtgtaccattgcttcgccccctctataagagagaagggaaacaatttccactttaatgtttcttgtctcatgcccacgattgtcaagcatgagcacaattgctaaaactcatgcaaatgatgttaaggattttcgctttcatgccccgagaaggattgttcccgaaccatatatataaagctaacacagagtttattgccagatgaacgaattggttttgaagaaaaaagtgacgcacaaaacttgccctttggagcataaatgttttaaataaattgatgctccatggaaggtaagaatagaaataaataaatgaaatggagaagatatgaagatgaaccaagttcgaagatgatacatcaattgttccgtgacaatgacgccagaaatacatgttggtatttgatacggttatagataaatccacaagcgtatgaatactgctgtagcacttcacctaagagtatcgaagggtatcgaatcacagggaatgtgcgtttatatctaggaacagaattctatgcaaggataatagctaatggtaggcttaggctatagaggactcactgggataatttactaaagttaagttaaaggtaaaaccctatcaattgtcgcaggcatagtctctctcatggtctaccaagctgagtatggcttgtagttctatgatgtacccaaatgtggagggatacacaagacggacagggttttcaccacctgttgtctacctcactttctatgaagcacacaataaacgaaggttaccgctaacctagacaccacgcctaagttattgattactacactagcctcgtcctgacttccttcgctcgttgcaaaactgtcttggaaatcgaagatacagctgatgaatctccaaccatcaaataagagcattcaaactctatatcccaagattcgactgttgagtcctcacccaaatcacgggaaccgaaggaagaagaaatttagccttcagaattctccttccagtttgtgggtgatcattttgaagattattgaaacacctcaaactattatgctcaaaagagaccaccagtcccacgtagttagcatgaagctctcgaggaaaatttcctcaaaaagacagtgcatgaactaactaccgtcatgagcgattagtggttaagggaggaggagctctgttctgatgcaattcggattagctccctgtccttagccattccttgtctcgtgaaagaggccttggtgaaaactctttgcaatcccactgtcattgcaagcattatgtttgcaaccttcgcactaatgtgcttaggggagaaccataaggaccacagataaaaccttttggggtctgtctggtcctgccattgaagggtatcgaattattagcagagtgccaatcaggcacaatgatgtcgagatcatcctagacttccacgtgttcgaacttcatgacttcgacctccacatagaccatctcatagaaaagatctacttagacgagcctcgaaccagagtcctcgacatcaaactcgggaatctgacgttttctttcatgatctcacaattgaaaaactctttggaacctattcccgagtccgggctaattgaggaagtgttggttgtctcttcatttgagtcccttggatacctccttgaagacaatgccattgcatttgtcaaggaagatgacaatcctgaagaggtgattgagttacccaaaaccgatccaccttcacaacatcttgttgagctcaaacccttgccttcagacctaagctatgcttttctacatgatgacacggggtcgcccttgatcataagtgacaaactgactgatgacgagacctcccaactcatagcataggtagaaaagcatcgctctattctaggctacttgcttcctgatcacgaagggattagtctggctctctgcacacatcacattcctttagatccttcttgtgtgcactctcaagagtcgtgaagaaagagatctcgaaacttctacacaccaggataatctatctagtcccgtgtagtaagtgggtaagcccagttcaggttgtgcctaagaaaggaggcatgacggtcgttgaaaactctaaaaatgagttaatgccacaacaaaccatcacgggatggagaatatgcatagactacaagaagctcaacaaggctactaagaatgatcatttctcgttgcccttcaatgataaaatgctagagcggctggcgaaccactcattcttctgtttccttgatggctattctggctatcacaaaattcccatccatctagatgatcaaacaagacaatgttcacgtgtccgtacggaccgtacgcttatcgacagatgttgtccggtagcgcaacgcatctgcgtcattccaacggtgcatgatgtccaacttttccaacatgatccaagaaatcatggaatttttcgtggacgatttctccgagagggtcgtagagatggacaaggctaaaagtcaggtaatctaacagcttccacctcctaccaatgttaagggagtgtgtagttttctggatcatgtggggttttatcgtcggtttattaaagatttctctttagtagctagacccgtcatcagtttgctagttaaggatgctccttttaactttgatgatgagtgtataaaatctttgaatatcctaagagaagcactcatatcagcaccaatcatttaacctcctgaatggtcgctttcgtttgaaatcatgttcaatgctaatgattatgctgtagggtccgttctcggtcaaacgaaagaaaagaaacaccatgctatcgcatatgcttgtaaaacgttggcatgagctcaccttaattatgccacaactaaaaaagagctcatggctgtaccttttgcaattgacaaattcacatcttacttaattggagctaaggtaatagtctatactgatcatgctgcctcgaaatacatgctcactaagaaagatgcaaaacttcctacaccaagaatttgatcttgaaatctatagataaaaatggagtagaaaatttcgtaacagattatttgtcgcgtatgcaaatcactaacatgcatgagctatcgataaatgattttttgcgggatgatatgctgctgaaggtaacagacttgaacccctgctaagcgaacatcgtgaatttcatggttacaggatatgtgccacctagggagaacaagcaaaagctcatctatgaaagcagaaggcatatgcctgatgagccatatctatatcgagtctgctcagatggtctactcaaacaatgtgtaccaatagtcgaaggcatacatatcattgagaaatgccacacggcaccatatggaggacactatggtgcattccgcactcaggcaaagatgtagcagagtggattctttaggcctacaatgtatgaagatagaaaagaattcattcggagatgtgcaaggtgccaaaagcatggaggtatcaccgctcgcaatgtgatgcccatgtcaaataacctacaagtggaactctttgatgtatggggtatcgactacatgggaccctttccaaagtcctatgactgtgtgtacattctagtggccgttaactatgtatccaaatcagtggaagaaatgtcatgttatgctgcggacgccaagcatgcctgcaagatgttccacaaggtcatcttccttcggtttggaacaccgtggatgctagtaagtgacaaagggtctcatttcactgataagaccttctgaaactttttacaagatcttgaggcacaacacaacattgccactccataccatccctaaataagtggtcaagcaaaaacattcaacaaacaaatcaagaatattctgcagaagaccgtgaatgaaatgtgggaaagcatggaagcaaaagctatacgatgcacttcgagcatataggatcgcatacaagacgcccatcggcatgtcacctttccatctcgtctacggaaagacgtaccatctacctgttgagatggaacacatggcacactgggttatctggacatggaacatggatctaggacaagccggacatcacagacaactgtagattttagagctagaggagtgcaaagataaagcttatcataatgccaagatgtacaaggaaagaataaaagatggcattataagaggatcaaggcaaaggagtttgtagcaggagacaaggtgttcttactcaactcccgggtgaagctctttgaacacggaaaacttcggagcaaatggctaggaccgtacaccgtcatcgacacttcatttcatggggcagtcacgcttcaggatgatgaaagtaacatctttaaggcatatggtcatcgcttaaaaattttcctagaaccgatagaggggttagggcaggatctagacttagttgagttggtcgattttggtgcaaatcctaggatcgaaacccaagcctaacgggatagacatctagcctatttgcctacctgagccagctgagataggacccaaggggtgttggtggttgttaaatgtcatttttaggccgccaatatatcgtaggctctctggaccttccattatatttgagagatgaaataaataattcaagtcatcaaacatgcataatgaaatatctgacgcctcgagagaggaatattagagacattgctgggcctttagcctgccagtcaacttcagcctaagatgtgcccgtcaaaccactcgaaagcggtgaccagatgtgttacacattcaagagacttgacaaaaatggctaaagatctgcaacatctcaaatattcttaactgatactcatgtgaatctagttcccaagatgtgcactagattcacactttcatcttaagcatgaatatacatagcaagatacatctaaagcaaataaaatttagattacaactaccaaatagatacataggccgaccggccaaatatagctatatcagtgaacagcggaagcttgactacccaatcctcaggcacatcgactcagggtttaccccattaagttcaaatcctagaagaagcagtcgaaacccgcatcactcaaatctaactaagcctattcctgcaaaacataaattaaacaacatatggcaagactcagtacattaatcaaattaatatactggcaagagcactatcaaacatacatacatgaaagctctaagtcaaaggaaggctatttgaagtctcaattttaagcataaagcaaattttagttcacaaaccatttgcaacataatttaagcaaaacattttagcaatatgtaaagcatattaatcatggcatgatatcaacataaatagatagacatcattcccttacaacacaacgggaagtaaggaaatcacatcgcatatacctatctcatcatcgtctcaaatcatttagtttcaaaaacatttagaaagcacaaaattatacccatagcacatcatcatgtcgctcatgaccgtgagcacggctaatcgattagtttttagaactctgcagagtttgtacagctttacccacataatatgaactctctagtttgttttgagtttgcaagactccaccacactcttcatgttgaattacactacttagaatctagtcttgcaccagcacgatacgtgttcctccatcctaggcatacttggaaatatgtctagaaccgttaagtggcaggcccacgccttaaacttaacgccgtggtggcggacacgacgggaacccaccacgtggcaaaataccgttgtattggacacgcttagtcacctaaactaccacgtcggggtaaataggaaactcctctgaatcatcgactaatccctcagaattatcgactaagggtgtgtttggttgggctgtagcctttagaaaagctgttgtgggctttagcttttgtaaaagtagctttggaaaagcagctatgaggaagtcaaaagcccgtttggttgatcagctgtggcttttggaaagacctctcgcacttacgagtggaccctgcctatcagtctcactgcattcatcttcttcatcaagagattcgcgttggggctcgctgccggcggcgagacgagaggaggagcagggatggcggtggcggcttgtcgaggacgagcggcagcggcggcatctcggcgaggagcggcggcggctcaaaggctgtggtctcgacggcgccggcgtcaggaggggttggaggcggcacagcgtcgggcggggaggagacggtgcggcgtcggcgtctggaggaggcgcgctagcgttggacgggtcgaaggcgacgctacagttaggaggggtcagaggggtcagatagggaggacgcggcatggcgtcgggagggctatatataggcgcagaggaatacccgtactgagctgtcaccatcagtggcccacctctcatccgcaatatataacctcaaataatgatatcccgtaatctagacaccacgtctaaactaccagatactactctaatatcatcgtcatgacatagagtaattgcataagcaaacactatactcgcatcaaagcatctcccagataagctagcagtatattcagtataacatgaacataatgtaaagaaggtactcatatactcggaaagtattccaataccaaaaatgtatttagaagagtattctaataaaagtacaaagcttacaaaagaggaaaggaaagctactagagccatacccgaactcttccgaaggcttccggactcctaattcctattctaattctattccaccagctagatactactaaactaaacttgagaggaatgagagagctcttgcttgtggtgtgtgttgaagtgaagagagtgagctccttgtatacaggtaggtatgacggttgtggaaggggaattgtccgaagtaccctccaaccgtcattggggtgcaatcttggacgtccatgccaaaccctggcctcaacggtggagatgggggttcggccgaaccccctagttcgaccgaaccatgggctggcccaaaccagcctatcttcggctggtgacttcctctattgctccactccacagacttgtgaattttggcccaattcattgtgtcaattctgagttcttggcccattcatacataagtctggttttcgacaatgtccaattgatttatcatttgtgttgatgtcgattctcctccactttattgtcattctctgcaaaaggttagtacacccaatactagtggaatattattattctaacaaacatatgcattgcaagcatcactagttctctcctgttttagtaatattgatggtcaaaactgatcgataacgaccgtcaacaaaaccccccaagcttgaacctttgctcatcccgagtgaaggacaaaaggaaacaaagacttggttgttgatcaggagttgctactatgctgcatatctcaaaaatacaagtgcaaggtatatgtactctctcttagattaaataatctttggcacggtggcttacccttacccctgattcccacgagacactgcttttccttgccttgggcagttgaaagacagaacaacaattagagcaccaatcacccaatctttattcaactcttattctggaagttttcaaatgattttgaaaaagaaaaccaagctcctcaattgattcactcagtctctctaagtgtatcaatttgaattcctcaccaaatgatgcctttttgattcctactctaagttttatatgtggagctcggtaaggatcagacatggcatacttgcattcacatctgttactaagtcaaaaacttggactaaagcagataacttaacatactcaagatcaagatcgtgcataatgtgtgtggtatatagtggaaatggtgtatgaggaataaaagaaaaatgcttctcctttgtgcttactttcttctcccaaaaaatccttcttttattgattaggagagggcatggctacatttctctcttcttctttttttcaacatcatgctcatgcttgatggagcatagctttatttttttttcacaaccatgcctttctctcctttctcttttttttttctttttttcaaaaggatttttcttttcaggagaagaaagcacatgaaagcatggagaatttattttggtggtaatatggatatggaatggaatattgcttagctcctagtgtaggagtttagcatgtgcataaaagtgggtgtatgatcttgatcatagagcatgagaagtatgtacacaagtcacaagagtttgacaaagttcaatggaacgacaagtaaccaaaatgtatatggtttaattatgacagcatatttttggctctggtaggaatttatatcaaattaggaactttcaatttatcattttgaaaatcaaaacattcggaattcaagccaaactagtatcaggatcatagcaactcaatttactatctcatatctcgcaacagcttagacttagatcagcaagtgcagcccatttacctcagtttcccagataattgttggctactcatatttaacctttgagagagtatttaccaagaacccatatatcagagatataaaacagagcaactattcatcatttcaacaaagagaactagcttgtcttacctagcatgactcaaacctatcatatctttttggtattttctattttgcaaatttttatattgtttttattttttataggatgcaattggaaaacaaatatgcaattggaaagggaaatatgcaatgtgatacaagttacctcagtggggggagtgaagtctccccccaagcctggctttcgcttagggtccttgataaggattgaacccctaaaaacgaaagtacgcctgaaggtcatcatgctgttgttgcatcatgttgttgatgttggggaattgagcatcagcagattgttgccattcttgcgtttgagctgtgtgttccgtgaggttgtactggatctcccccgtctgcatatcaagggtgtccatcctcctagtgatttcacccaagtcccaacgagaggaactcgagcgccattcacttggagatggaggcacaccacttgatctaggaggttgattgtccctcccagtggatgtcatgaggcgcatgccaccggtcctcactggcgcttgaccaggttgagactccgatgttatggcgtggagcttgggtccttccgggtgcatccctagttggtgcccaacctgcctcgtatatctgcacgggtgtcgaggatgatgaactttcttgttcgttccttgtcatgttgcgcgtctccctgtatgttccacctgcatgagattcttctatgatctgcagggaaatggttagttcatggcagttatacaaatgataccccgcatttggcaacaagatttcatttatacaaccggggaaaaagtatatcaaagatccatctgctccatgtttcaaaatatgcccttgcactagataagccttatcaatacgcggacgagcagctgagataaaagcaatttggttgctaacgactcctagcccttttgctaaccgagtaatcagagaagtgcactcaacaagagcagagaactttatactttctaaccattgtcttatcatacatttcacaggagaaattttgatctttctaaccatggcaaacatgataattagttcatctctcctaatgggtctcagatcacttctaggaaacaaagtcaaagcaatccatttgtgcatgagcctaagtgtaggattatggatatcattcgttctagatttcttgcaaattggagcaccagaaatatcttcccaaaacctatttttctcgaacctagaaattcctttctagagatcgattttacaggaattgtgaaaaccaagaagtgtactcaagaatttccatgtgagtgtgaactccttacggaaaaagcgaaaagaaataccatcttctatttttttcaaagtgcatagaaattacaaagtaagcaaacgagaaccaggctcatctaccatagcaaatctctgccaaccaacagctttccaaatagaacgaaatttaacatccatacctatctttttcagcaattccggtgagtattctcgtgtgtgagcatactcccggtcgctcagcatgtagtaggcttgtctctcccgatcactgacaaggtcgaggtcagcgtcgctcaggagttgtcgcggagcgtcggcgtcttccatcgaggcatcggctgatgaacgagtactagactcgtcatgacgacttgatggagagcccgaccccttgaacagatgagacagtcgcctcctcatactgcaaaatggagcaagaataggctaactcggcgggggttagaaatgacaagagtttcacccgctggttagtttcaccaaagcaacttgtatgtatgcaactaaagatttgaacttgaggaaaactatcaaagcatgaatgaacttgggagcaaactttggagagggaatgaaaatgagttgaaatggggtggaattccctctctcggccggctggcttttatagggtacccactagccgttgcctcaaaaagtgaggcagccaaccattgcctggccggttcggccgaaccagggtgttcgcccgaacccctggtgggcccaactggacccactttcggccgttggaatccaacggtcagtgtgggcgtggcactgtgaattttcgttgaaaatttaattttggtttgttctgaaaaattcatttgaagaatttcctcgaaattcaaaagtcctaaatgcaattttgaaattcaaatatatgatgatgcaaaaattcaaattgttgaaagaaaatatgcggatacataccaatttatctgttggcaaaggttgcgtcatctaaagtccaacgtgcaagaccgtgcctccttctgattcagtgcgcggattttccacccgtctccggaggtgatggagcgggcgtctttggcttcttcctccacaccttctttgattttggtgcagaagacggcttcttctgagccggctgctctgacttcttggccggtgcaggtgattttaccggcgtcctccaataacggttcttgggcattgttgtttccttttccaggaagttctgcataaaccttaccaggctatccgtcttgggtggctccacttcgacctcttgaatgttctgcgggtttggcccgtacttgattctgaccatggagcctccttcccgttgatatggaaacggatactccccgttcccacgtcaatgttggctcctgcggtgctaaggaacggactgcctaggatgagcggcgtctccttcctcgtgtccatgtccagcaccacgaaatcaaacgcgatgaagaaatcccgtatcttgactggcacatcctccactatccccaccgggtaacggactgacgagtcagccagttggaggcgcatcggtgttggtgccaacaccgtgaagttgagcttgtcaaagacatcttttgacatgacgctgacgctggctccatggtcgcacaaaggcctggtcgaattgttgtgccccgatcgagtagttgatcgtaggacaccccggatctttcttcttctccgagagcttgtggagtattaggttgctgcagtgttttgtcagcttgaccacctccgttgttgggagcggtctcttgttgttgagtatgtccttgagataacgggcatatgtcggcacttgcatagcgtccaacaacggcacgttaatgtggatcttttggatcacttcaacaaagcacgcccatgtacatcgcctcctcacgggtttccgggcagtcgttcccagaatgacctgtgacgccgcagacttcacacttgatgtgagagtccaaggccttgacggtgccttgtggccgtttcttgtggtcgtccaatcgtttcatgaggaggtccagcttggcagcaagtaactccgtctccttgacggtgtgcatgcctcgctgacgggtctggagtcattcctcgctctaacccatattggagaccatcttctccatgagttcaacggctccttgaaccgttttagagaagaaggctcctctagctgccgcgtccaggtgatcgcgggacatcggggtgagcccattgtagaagttctgcaggatcagccagtcgtccatcccatgatgaggacaggcggccacgtactcctgcagtcgttcccatgcttctggaatggactcgtcccttgtctgctggaaactggaaattcgtccacgaagggcgttggttttgcccatcgagaacaacttctagaggaatgccgtagagcatttatcccaagtgttgagtcttgctggccgtagagccgtagagcagcacggttggcatagaaacattgcttcgctctcccgaggagggagaatggaaacagccgcagcctaacggcgtcaggactgactcccttgatggtgtacatactgcatatctctaggaattgctgcagatgaggttggcatcctcattaggcttgccacagaacgggctatcctgcgccatcgtgatgagtctagacttcaagtcgaaatccacatctcctatgttgacttgtggcccgacggccacattgtcagcacagggagcagcgaactcacgaagagtcttgctggccataatcttgaaggtcggtggcgctggtactgtaacatcctgaagttttaattaatcaacttaagtggaaatcaggatttgtccttagtaaaagttggaagttttaaagctatttgggttcaaaacctcatccggttaatttgtgtataaaaaaagatgggtagaaattgaaaccatttttccaaactgttggtttgagttaatatgaaactttagtgatcattataggtaggctaatgaccctacaaccttttggtagataaacaaaaactattttttttagagactcgtccaacattcagagagtgttttggcgctaataaaatatacaacactttcgaggagtagctcgactaatttgtgttcccttccacgaggggaacattgtttcaagagaccaagctgactcaatgcttgataatccatgaagctctggtttttgttgtcttctactttttagcttctaagctttgtctaagcctctttgtatataaccaaattaaatggtcaagcggtagttaagaaacgttgtagtatagtcgttaatctttcgctctttggataatctacccaatcatgcttagcaattggctagtagaattagtaactagtgattgtgtgcttgtgtacttgttgtagtgatttttatgttgttcataattggttgatacatgttaaataaacctagaggctatgtaacaaatctaagcaacataaaatccatgaagatcctcttgtcactcggtcaacctaagttaaccactatgaaggtttcgtgattttatcaaactttttactacctcaagtaaagcagtcaaggtagtcaaactaaattaattagaaacctaattggcaaaatgaagcaacttctatttgaacaataacttgaacagaagtgtaaatttataataatttattcaaatactagtttatttatcaccaacaaatataaattttgtggaatttttactctctgttttggccttctaaaaattcaaaccaactttcagcctaaccaatttcatcttttcaccagaattaaaatatttcgaattttttagtgaaactttgaaaaatgaaaactaggtgtctaggtctatctccacacaaaaggataaaattctatcactattatttcttgagctaactgagtgtcatggtggaagaggtgtaaaattgctgaaaattcctgaaatctacccaaattcttgttccacctctattcccgtccttacctcttagaccaccacgacttgggcccacttgtcacagaccttgggtgcctctttatcccagaacccacccttgggtgttcaccccacctcaggacataaggtgggcagagaaaaaaaccccttcttcctcccctttcccttcccttgcttgttctttgttttcctcctcaagctgagctcccagctcacttctcctccccaaatcctatctaagaacccaaactcaagctctgtatgttagaccacaataatccccatcatccaagctttccatccatcccaacatcttgcacatgcatgaagagttgagagagatcaagaaggaataaaatagtggtggtttcagcctgcagggctacagcagcagcattttgttttcctccatttggtgagcttccttttcatccatggtgcctcttttgaattccctccatgttgaacatctatagcaacgttctataggttgtccactccattgctgcaggtagaaggtggctacaactcaccccgagttcatctcttttgatttcggttgaagcagccctaggcaacgtctcttgccgtcagcccaagaccttgctccatctcttgccattagcccgaggccttagcctcgcatgaccctacgtccaggttgctgcgatgtgagcgaagtccggtggaagttggagaaaaggggagtgaaaatagaaatcgatttctgagatagcttttgagctgaaagaggtatgcgctttaaaaattcataactaattcatatgaactccgaattcagttaaccaaatttctgtggattaagaaaaacatgaccttcaatgctgtaaaataaaaatgaccaacttttgtactggttttcccagtaaaaatataaatagctatatgtatcccttgtgtggtctagctcttaataaattcgtaagaaattattggtaaaagctaaaattgtgaaaccaattttgttgagcttatattttagtactctttgctgttgtggtgttgtttttggaaaaactacctcttaaaacatctttaggagtttgtttagcattcctatgtttttaacttgtaaaatccataaattaataatgacaacacatatagctgtgaaataatttttcttaggagctgtgagtgatgtactttactctaaaaataatcattattatgaaatcttggtttgaaatgcattttacttgtaatgtactaaaggaaacgttaatatctacagaactaccattttcagcacctgagagattgtcattttcatatctcccaaactataagtgataatctggtgattatttcaactaaattcaagttaaaatatgatctacccactgtatttatttcataatttattgatcatttttcttgtgcatgtttatttggctcttattcgcatattgcttcttttcgatagattcggagattccggagagtaacgagccatatcccgaggaggatagtgactatcctcagcagcaaggcaagcacctaagcatatagaacctatgctttctctaaaaatgatttggttgcaatctatacgtatatatatgcatgcattgcctagatattaatatcgtcggtttatggtgtatgggaagaacctatttatgcatttagttcttgtaatattgctgtccttataccctattaccactagttgggattaattgggatgtcttattcattaatgcttagccatgcttagtgctaatagaactatagggatggacagtgctattaattgtggtatatagacaacttgcattattgggcataaaacttgagcacttacactaaataatggttaatgaattatgttggacttggacgggtgatagggcgatgatgggaggttggtttcccctgatacaagtagccccgtctaggtcgctaaggaccgaacattttgacatctaatcaagcaccctacgtacttaccacatgccttatttgggaccggcttgttcttactagttctactgtgatcatttataccacattggagagtcgtgaggcaggtagcctttggagggcctcgggtgcctaggtttggccgggggtgcctcccgcgtggcgcgcccgccttggtcacatcacgcacacacgtgactgagtcgttgggaaccccaacgtggtataggtggttagggtggggctaaagaagggcatgtaatgagcttgaatcacttgtgtaccgcacttgacggggtgcgtagcatttgaactttgttcatttcgtgtgggtccagttggacacctctgatcagagtataatctattcgaatagccgcgtcctcggttatggacattgcttgatgtgtatctcactcatgttagcatcaaatgtggattattatggatgggattatgtttgatggtggtgttggcatgttgtgccatgttggtatggactttggtagtccatggttgatgatgagagtgccgtttgggctcatttgcttatacatttcagaattatatacttgctgtccataaattaaaatgatgctagatttacttgtccttgcttattttactcattaattgctcaataaaattagctttatgcaaatgttgaacctagagacccactataggctagaaagcttgcatacttctctcccttttgtatatataattttgggtaagacttgcgagtataatcttgtacttaatctggtgtctgcaatttcaggagaggattccgattatgagttatgcttcttgtgtggtcattgctctgccgaaggcggcgagggcaatgagtgatatcttgcagcttggctcttgcctggttggttgccctagtggggtttggcaccaccagttttatcttttgcttatgaactctatttgagacttccactgctatatttatgtgttgtatattgggacctcggaccctattatgtgtcatgtacctcgctgcactttaaccctattatggtacttgctatgtttattaattgcttgcgatgaaagtgtgaggctaatcgtattcctggggactagctaagcatgagtaacgggttttgatcgcttgagataatcggggatagcgctttggatcgagtcactagggtatgcttttggtcgccaccttcgagtggttgatgggcatatgacggtgcggactggcaagctatcttacggttatgtcttgcgctcactactcgacattccggttattataacagaaggttatcaaccgcgatcatggacacattgaggatgagtggctatttatgcgtgtatggatcccacgtctccaatagtatgtggtggtcgtgttggacactggatggtataatactcggggtgtccacaggtacggctggtttctctatcggtagagttttctgtggagcaacgactcgcggcctgacgctccggaagaaagcttctggattttctttgaagttttccggcaggttgaaaccagtcatgcactaccctgttttcacaagagtgaaaacaaccaaggttagcctgcaaaggaaaatgattatacagaggtaaatataaagtattagttcaattaatctctatcatgaatcttccccggcaacagcgccagaaatgtttgttggtatttcttaacaatattactagaaatacttctggtatattatgattacaaagttcatccgcaaacatacggatatactattgtagcatttcacccgagagtattccaagggtatcgtatttattttatcccgtgggaagatcatgtagagagaactcaactaataacttatatattacttgtgataatcatattctaagcagggtaagataatctaagggtagagtgacacacaagcattactactcatcctcataataatgaatctaagctaggtggaaagaaaagaaaaagagaatctattcctatacttctaatacacatggaatacatacattctagttaactggtatactagctaataccctctattcgatgcccttctggtacttcgagaagccactcctgactgccgagttccttaggacagcccgtcatgaccatccaaccagggctaaatacggaggaataccctccctaggaaattaacttaggattatatataggcgcggtggaatacccgtactgagctgtctccatcatcggcccacctctcatctgcaatatataaccccaaataatgatattccgtaatctagacaccacatctaaactaccagatactactctaatatcatcgtcatgacatagagtaattgcataagcaaacactatacccgcaccaaaacatctcccagataagctagcagtatattcagcataacatgaacataatgtaaagtaggtactcatatactcggaaagtattccaataccagaaatgtatttagaagagtattataataaaagtacaaagcttacataagaggaaaggaaagttactagagccatacccgaactcttccgaaggcttccgcactcctgattcctattctagttctatttcaccagctagatactactaaactaaacttaagaggaatgagagagctcttgcttgaggtgtgtgttgaagtgaagagagtgagctccttatatacaggtaggtatgacggttgtggaaggggaattgtccgaagtaccctccaaccgtcattggggtgcaatcttggacgtccatgccaaaccctggcctcaacggtggagatgggggttcggccgaaccatgggttggcccaaaccagcccatcttcggctggcgacttcctctattgctccactccgcagacttgtgaattttggcccaattcattgtgtcaattctgagttcttggcccattcatacataagtctggttctcgacatcgtccgattgattatcgtttgtgttgatgtcgattctcctccactttattgtcattctctgcaaaaggttagtagacctaatactagtggaatattattattctaacaaacatatgcattgcaagcatcactagttctctcctgttttagtaatacgttttagtaatattgacggtcgaaactgatcgataacgatcgtcaacagcgtcgggcagggaggacgcggcgcagcatcggcgtcgagaggaggcggcgccggcgtcgggcggggaggaggcggcgccggcgtcggtggggaggaggtggcgccagcgtcgggaggggtcggaggcggcgcggcgacaggtaggaggaggcgaggcggcggcgtcgggaggaggcggcgctggcgtcgagcggggaggaggcggcgtcggcgtcgggaagggagtgcggcggccggccggctggaagggagaggcggcgctccatcaccactggtgtgcgcgtgtgagaagcgacgggaatagattagcgaacacgttttctttcataatggcagaggtgggtaattttttcccccaaaagaaggtgaaagcatagggtagaggtgcttttgatttgtactataccaaaagctgactttgggcaaaagtagctgtggcttttgggccctttggttagcttttggcttttgcaaaagcaaaagcaggttgaaaaacccaactaaacacaccctaactcatacacacctgcgtaccagaatgcaaggctagtcctaaatagattaatcagcttaggccatcccatactagcacatgttgatgtacggtaaacataatgggtgatatgatgttcggtccttaatcgactcaggcgaacactccccctatcgatatgcaactactaccatatgcataccacttgccgtctaagtctaaaatcacattttatctcattttatttcaaaaataatcagagaattaactctgaacataatgtttaaaaaggagttccaaatagtatatcaagtgactcataaccatgtttctgtttatcactaagcaaggctaagcatttgcactttataaaagcatagtatagttatatgagcacaatcaaagtacactaattaatcctaaggttcaaaacagcaaggaagtgattttcaaaaacgggattcatgcatcttttaaaggtagaactacaagtaccgatagttagaaatacgcatgcaaatttataatcaaaacatttagcccgaacacatgggattcaatgtgttcaaaggaagggcaacacttgccttggaggatatatgacctcattgaaattagatataatccatcgcctttaccggtatcgatttcaccttctaaaagaaataacagtaacaaaacatgtaaaaatctaaaatgatctaaaatgcatgagtttactagtgtggttaggtactggtctaagatgaatttaggtgaaagaatttatattttatcactttgcattagagagttataaattttcaaattttaatactagctctagattaattaacctctaatagtccttaggtgcattttaggtctaagttttttgaaatgttgtcttgctgccgtgaaggggatgctcacaggagttcaacaaagttggtttcacaatttttaaagttagcatgattttattatgaattttacaagctaggtcatatgctatagtctttattagttatttcgaattttatatatgttttgagtactgtatgtgtcatattttatttcatcaaaactaagttcatgattttgccaatctaacagaactgaaatcacctcatttggagttgaaataaatcacctatgggttttatattttctagtttacactatactagttattttaccaattaaatagttggtgatgattttaatacagaaagtatcaagttttagttcatgtaaatcaagtgtatgattttttgagcacactggaatttggttcactccaaattaagttaagatgaattttatatgaattttctaagttgaagattgctctatgttcattatttattatgtgaattattagagctatttcttctactgcaagtgccaagtattatgtttccatattaagattcataacttggtgattctacagaaatttatttcatccagattggagctaaaatgaattttatatggaatttacaagttaacctatttttctgttgattaggtattcactaaggcattttccttatattttccagattttaaacacatagggcccactggtcagtgagatattttttgcagaaaggtccctcgaggttctaggaataggtcccgaggtacctagctcgttttaattgaatcttcattaagactactcaaagttttatgtatttataattaggtctaggtcccacatgtcatgctctagttatttacaaatagaaccccatatgctttgatctatttctaatcacagttcttaatgcttaatgaagtggggaccacctgtcataggctcggcagaggaggaaacagcagcagcagcagagcttcaccggccggcgggcttgacgtcgacgtcggcggcgaacggcggggattctgacgtcgcacccaaaaggagaaaagtgcaccaggctcttgcgcatccgacgatgttcgtcttgtcgccggagatggccgggatggatgccggaaacagcgcgagcggcggtgaccactagtctgcgtttgcatgacaatttctagtgaggatttgtgcgttaaggtgcatgcatgtgtgattacgatgctcctggagacttacggaaggtcgcctgtaggtcggtgatggatggacggcgatggcgaccttagaagtactccggcggcggcaaagaatggcagagcgacggcgacgaccactccccatgcttcggcctgccaagaagagtagttgaacggctcaaagaaaacctaaggatgctacacgagcgaggaaatgcgccgaaactcactcggatgcaaggattcgacgacgatagccggtagccggacttgaggaagacgacggcgatctcttcaacggcggtgtcttgggtcgattgcttcagtaagcagctttctggaacctttgtgatgatgatggcgcagtggttcggccagagacccaccggatggacgggaacggcatcgcgacgtcgggagcgacgatgagctcgacgcagggtgttcgacctgtgcaaaatgagatttcacacacagatggatcaggtagaggtagaagatcacgtttccatggatgaaatgcgcctaagatcaccagagaagacaagaaatggatcaaacatcttcgggttaaagattgagaagagtgttctgggttcctccgagaaagttcttggtgtttttcctagtggaacacgatgaaggatggatagaaatcactgtggcgaagtatcactctaagtgatggatgttgagctggaagggaggggttaggtgtcaacatttggctgtaacacgattttaatgagttggcaagggttgagggcggtgctatctcgtctacatctcccaagctagccctagaggctgtcaagtggtctcattagtgatttcctaggtagatatgagacgtagggtgtgttcttgagtgtgaattggacttttaactctccctctctctttttcttttgttaataaatcaaaagaatgtctaactaaggatgtttgctggtatgtggatgataagtgggtccatgtggatgcatcctaggctcatatgagtggtaaggtagatatatgggtgagagttgtatttttaccctcctctctctcacctttagaaaaataaatgataatataaatgagaggtgtgtagatgatgtgttggctgtgatgaggatgacatatgggtcccactatggttaggtcccacttgtaagagagagaaatagaagaagaggcctagaagctctaaattttctaagtgttgaaactataccaacatgtggtttatttcattctcctttcttccatttagtttagaattttggggagacaaggttgctgctaggtggataaggattcgatggttcaatgtgacaaatttcaagatttaattacgctttgagttaccatggtaatttagtaaagatgcctaagttacaatgttgactacagtctaaatattgtttaagcaactcttgtggctctcatttcatgtggttctatttcgaattttattaagcctttgcaccaggttgtagagtacactatagttaacattctaaccaagtggtttagctagataaattatggttaaattttggtgaaggtgcaaagtaggctaaatggtatgctgttttcagatttctagctgagatgaaggatttatttgggataccatttgatgtgataaattcaaactaaaattattgtagacttaggatgctgtttagtatttatgagaattttggtgcaatttgttgttgcttgatttatttttaggaattttctttagatatgacatgcttatgaaacctattatgagatgcaacaattagaacattcaaaaacaaacctaaaataataaaatgcacatacaaccaagtgtacttacttccatcttaagttttgcttattttaaatcttatatctccatttgttttcatttagctcaaaaatattttgcttaagttgaaatgcaaagccaaaagaattaaattcctatttaaagtttaaaccatcttatttgaattgagatttgttaacccaagattttataaaatctaattttggattagctttaaatcttgaccaacaaatctttatgttttaattttatttacaggatttaaactctaagatcaactattatgctcttaaatgctttagctttcaaaaggttttaaattttcctcaaaatttttcctaggtgaaattcctggtatgttacacaatacctgcataaatcataagttattaaacatccaacatagtggtagggcctaattctaacaatttccgtgagtgttggtgtataattatatccaggtaataaaccaccaaagttgagaggaaatacaaccaaaagtggaggaaaattccatccatagaaaacttggctcatacacacattaaaatattagaagttgagcctaatctacatctcactaggccaagagatcatctgtcgaggcccaggaggaagcccatgggtcgggagctgaccagggtctcccctcgccgtttgcttccatgtggacatccaggattacctcccaataacgattgtggggcattttcgacaattccaactgccataaccatcattcggaggctatataagggcctctccctctccatttcaacacacaccaagtttgagctgaattacaagagactctattgtatttttatgtacactagattagagagagagtaaggagaaagagtcgtaggaattccggagctgtcggtattttcctctttaccttttgtacctcgttaagtactctgcattaatagagaatatctttcttgagtaattaagattttctttgtgagaattatctcttagttagttcctattagcgtactggatcattgtttactattgatcattaatagatagtgattactttggtgagttataacactaaagaagtgataaactacatagacgcggtgtataggtttttaatttccagttattgctacgtatcccacaaaatgttagagattggtgtagaggtagtgacagtcctcaagatcacctcagtccaccctgttcgggtacggagtagagcacgttttagtagtagcgatcaagccagtgcctaaagtattgcggtaggattaaaaagctttctttagactctgtttctcactacgaaatcatctctatcatttgcctatatatcccttgtgtccttggatgaaccaggagaagagttgagcacatacgttccctgtgaaaatcgataccttggaatactctcgaatgaagtgctacaatggtatatcagtgcgcttgtggattttatctatgacaataggaaataccaacaaggggtttggttgaacccctggaactaggcttcgccctgtgaacctgctggtggccccccttaccagtctcgatggagtcacggagaaaaagaagatggcaattgtgaatcgacacttctgaaatttcactcgtccgccaattcatttccttcttccttctctcttcctccatcttcctgaaccctagccaaatcccagtccaatctcctccaccaaaaaccatgtcgaggaaggcatttatctccctttctaattccaattccacattccatcttgacgggagatccaccatcccaatctggtgttcccgccgattgaagagggtgaaccaagggttttggagtccctagtgatcctgcctctgctcaaccatgacgaggggctcgcaggcgaataggagggttcagccaaaccaacctcagctttcctcggcccaccgttcggccacgcactgacctttgccaaggaggatccagaggaccccagctcgatcatcaagcccctaccagaggctgagaacgggctagatcggccctaaaaaggtgattcatttgttccaagggcccgttgctgcagcggtcaccgattcagggatcaggggagagccaacggtcctagtagggacgagatgtcctactcaagccttctgccaaagcttcaggttcgcatgaacatgcctgtgggccgtgtaaaggtactaatccctgggttggcacctagtgagatgctcaaggcagaggtttctcttgactcccaaccgatcacatggtgtctttctccacctccaattaagaggttggtggggagtttgagagcaacggagaaaaatctccacgagagtccacgatggccttttggcctctaccgttgctcagctgcgcactgagaacaggaggctaaaggacaccttgcccaaggacaaggtcgagctcgatgagcttagagttgaccttgcgtccctccgtcgtggcttttgtgccaagcattttcacttgtacaaggccgtaggaaaggaagacctctactgtgctcctatcctgataaggacacaaatagctggaatataaccatgactaccttatgtattaatcaaccaaaggttgctacacaatgagttttgtgtgtttttgtttgcagaggtacttgcttgggcaaaagaaaagagactgagtgtaaggaatgcatggatgattgaagaagttgattggggaccaagccaagaccttctccaagtcttgtttcatctcaccatgtcacttttggtccatagaagacaagagataaagttctacacgttttggattcgggttcgggcctcctaacagcatcaacttcaaacagatctagccactgatctagaaggaatttcggggcctattattacttgttcgaaagcttatggagtctactttcagatggttttggtcccatgtcaaaattcacaccgagctgccgggaaactgcaaaacaagccacgtatctcatccagtccgaatctgatttgggttttgggcattgtaattgtgtcgtgggcttagcccaatggggtgtgcgccctagggcaaccctaggatgtccctaatcatatttattcagtagccgtcaacgtttagagtcggtttttccttacattattctgttgagaacagttttgccgctagatcggtttgtaagaccccaacttgtgagcttaatcattcatccgcaattttggttgtattctatcttgttcttgtttgtgtccttcgattgacaaacagggattagccttctcgtcgaggtcatctgcgtttcgacacgggtgataaccagaggagacgtggtgctgcgattgcggggctcaagagcgtgcgcgttcaagaagctggatcgatttgtgtcgtgactccgcccaaatcgttgtttatcagaacctttcagaagatcaggaaccctagtgcatatcatatcccatagacattccctagttgttgttgatatttcttaacagcattactaaggagcttaattcatagcaatgatgctagaaatatgggcggtaattctttacgtttacaaagatgaatccacaagcgcacggatttactgatgtagtatttcacccgggagtatacccaaggcatcgtatttttaatcccaagggaagagattataagagagaactttattatttcatttcatgcctacgacagatcaaagactttgtaggggttaatgatatacatgcaaaaagggtaggttgacacatgaatcatcaagaaaaactattctgatactaaaagaaatagcttagtatagtggaaagaaactagcaaagaatcctatctgtacttcattaaaaagttgtctagtatacatttaatatgcactaatcgtacaaccaatacccttaactacgccctcctgttatgtcgagagaccacccttggttgctgagttccttatgacaactcgtcatggccatccaactggtaatgaatacagaggagtacctacaccaggaaattgtcttagtactatatacgcatgtggaggaatacccataccgagctatcaccatcagcggcctacctctactgtcccatggcatataatagcatttaatggtatccaataatctaagcatcacgcttacattactaaatactactccatccatgcatacgacatagagcaaccgaatggtcggacattaaactaataccaatgcgtatctctggtaagctacccatatgattaatacatattaaatttataccaaagcaagtaattaagctatataaatatagcataatactataactataaaaagaagaatatattattatataataaggtcttatgaaggaagagtaaactatttcaactccactctaactaaagctagaatataaactaagagagagcttcttggatttgatgcttcaaggtgtgtgttggagagagtgaggcctgctccttttatagccttccaatgacggcgattcctccgaaaagacttggagaacttcggaaccctactatttcaactccactctaactaaagctagaatataaactaagagagagcttcttggacttgatgcttcaaggtgtgtgttggagagagtgaggcctgctccttttatagccttccaatgatggtttcggcaattggaaatgtcataaacatcctccaaccgtcattgggaaatcatctgaagcgtccacgtggaaagggagcatcaacggccacgctgggggttcgacagaaccctggcctggcccaaacggcctacattttctctggtgcatctcttaatggatccttagtccagtgatatggtggttgggcctatttgaagttattttaatagatttgtaagcccatccatccataagtctgccactcgacggatttcgattgattgttcggttattctccttcatttatgagtgcttctcctacatatatgttattagtagcatagcatataatggaagtagatattttatttggaaattatgcattgcaagcataggtagtattcattaattgggtaatattgacggtcaaaattggtcgatgaccactgtcaacagttatccttagtattatgatagataagttaggtttaatttattctttcatttatttatttcgattctttcatgtaattgtggccattaataaagttgaaatagaataaatttgctgggcttcaccggatgagtacctttgctttcattttttgttgtcttttctgtctatgaagcaccccacgtacaacaacaagtgtggggttgaccttgtgctcacataatgcattcacgtaccaagatcatccacgtccgtgctaatccacgactcatgcacgttcgcgagatgagacgtagcaaccttgcatacatggctgcttatcatcacactcacatttgagcgatggtttgcacgtcatccctttatctccctaattcagttggattaattttgccatatttggaattaactcaagaatgaaaatgagtattgacataatcaactggaatatatgacttgctgcaaaatgacctacctactttttaatctttgatcatcccttgttacttgtgaaccacattcatgggaccacatgtcacctaagtgattgatgaatgagagattgcctgataataagaacctcactcttactgttggaaacttgggagttttataacaagaacaaaaataactttacatacttattgatgttttccttcctaccaacatcatatgtcagatcacattgataaaccttatacatataccacttgccatcattttgagttttgttagattcctttcatattttcacgaccaaagtcctgtgtacttatccaccaaaatatattgctctccctctatactggaggacttgcaacatatgccatccacctaccagatgctaaacttctacaccggaagtcggcatccaccatatctatccaccaaataaagacttcacatgactatgtttctccatcctcctatccatgctaaatgagacatgagctaaaaaaatgatcagtttttagaaaatcaaaatgctcaaaagagaattggccaatattctcgagcatgatgaaaaaaagaggatatagaaaatagccatgttctccaaataaagtatacacaggagaatcatataaaatgagtcataattccatttcacatcatccatctccctattccattccatccacatataagtgcataactttggtcatgttcatatgattggttatcttcttggatcctcaatttgactttataatatatctaatgcaagtctgtcatttcttactccctacccttagctccacagaagcctttagaaggtaggataagaaaaggcaatgtgaattccttggttaggaataaaaactttgagtgatttgagagaatcaattggggagtatagtacaagttatgtttttatgaacttcaaagaaaactacaatgtaatttatcggaaggagtaaaggccattccattcttcaatcagccaagatgacatagtagacacatcatgttcacaagtacagcttggaataacctatatgttgtgtcattaagcagaagtcattaccacattgatccatgagctttactcagggacgattaaagcataagcgtgggggtgttgttgacagtcgttaagtataaactttaaccgtcaactcatacataaaagatatcaaatataacatcaaaatttagtggtagggtttcactactaaccttttcaactagtcttggtaaaaatatttatgcaggtaattttgagagaaaataaacctgccatgcgacaaaatgaacctctggccaatcacacgcgagtaaaaggattggagggcccacgtgacaatggaaacaaacctaaagtggggccaaacgaacctctaccaccataggggcccacatgttagtccgaaagacggtcgagagaggcagtgccaagggttcggtcgaacctcaaacggtgcccctcatctccaccctccacgtgtggctttctagttggctcccaatgacggttgcgggagttaccgacctccccaaccatcataactccctataaaaggagcggttcactcacttccaaagcacaccaacatcaacagagtacaactcactttcgtaatttagacttcactttagtacgtgggattagtgacattgaggggaagctctgaatggagtgcccaaaagtattggagttctctccgagaatttctggaggagtgcccactactgcacaatacaccataggtaccagctagagacccattataggtgacggtttcccaactgataccaacttgagagtacctgtgcccgttggcataggtgccggttctagaaccagtacttatgaagattataggtaccagttctacatacacaactgacacttataatatttaaaaaaatcaatggctgccacgatggatacatcgcaggaacacatcatcgatggcaacggaggagtgcgacaccatgcagtgcaatgcgaaggagctagcggcacaacggagacaactaccctgttcaacaggaacacatgcagttcagaaaaaaaaatcaatctccaacagaaaaatgccgttgatctgttcatccaaaaattttagaagaagagcaaaatctccaacacatgcagttaaaaaaaatcaatatccagcgggtcaaaaaattaagcatgagcccatagcagcattggtcaaagtgtctagaggacatatgtcagtcaagaatgtgatctcataattgaaaaggttaattctaggtaaatggaaatgggaggtagaagattatggtgataactcttttcgcactattttttcttctactgctgaattaaaacgcatggtagaattgggtatagtgcatactaaggtgggagagactaaaatgtagattgtggaaagaggggttgagaatgaggttaagtatgttattccaaaagtgcctctacttcacgggcctcatctccaccgttaactacttgtgcatcgcttgcactgatttgttcgccgccgccgactggtgatctcacctctatacggaccacatcattcttctccaacgagcaactatgactgcaacagaaggacaagcaaaatgctctaagcttaccagctcaagcacgtggatcataccttcaatctggacttgttttggataaacgcaagtaatcaatcgagaagccttcgcatcgaagattgaagcactcagtagtcagtataggttatgaatcacggagaagactgcaactcgattatcaaggtctcaggggctactgtggaggagaagactgcaactcgattatcaaggtctcaggggctactgtggagaatatggatactaggtactcatacaacctccatattcgattagagataggtgataggccagatccatgtattatatagagtaggactcggttgcaatgttaccatgtgttctatggcaggacctagagtaccgagtgaggattatcatataatagattagcaaactaataccaaatccgattaggtttttcgattctctttgtaaccctatcccctacctatataaggtggatagggagccctccaagaacatatagcgagataagcactatcaaatcgttagatcaatatacaaccgatggatactatcggacttcctcaatcatgagtaaggtattacctctcatcgaaagtgtttggatctgattaaattattgtctttacatccatttaattttaggtctgccgatttccaaaatctataataataattgtgactgctgcactatacggaggctactgagatgggaaagtgttagtcacattgcctgcctatgtcgaataggatagtcatatttatacatttttttgccattcaagaatcatttgatttttcttactaatccattgtcatcagatgttgaacgggggcatagcctcaacttgcaattttttgaaaagaaaaaagaaacagcaagctttactggaagtgaagtgcaaacctttggaaaaaaaaaagctgcaactttcctgttttaaattgtgatatattttgctatcgccgcctactgtatgaatctaagggagtggcgttctgtcgaccgtctgcgagcgaatggccacggctgtgatggacagcgagttcggcagcctcgtcaaggtgtctgcggcggtgtgggcggcaatgttctacgcccgcctcgccgccgcaagccttcgccccggcgctccccgcctcgccgcgctccttcccgtagtcgcgctcttctgcgtggtccccttctccttctccaccaccactttccgcggctgctctgccttcttcctcagctggctcggcgtcttcaagctgctcctactcgccgcgggccgagggcccctcaaccccacgcatcccctccaccacttcgtcttctcggcctccctccccgtcaagctccggcacctcgcatccgccaagccggccaaaggtgtagatccagctccggccaacgagagcgcggcgggcaagatcctcgtctccggcgccgtcatccccctcatcatctacacgtaccagttcaagaacgccatgagccggtaccagctcctcatcctctacaccgggcacatctacttctccctgcagctcctcctggccgtcgtccacgggctgatccatggcgtgctcgggatggagatggagccgcaggtggaccggccgtacctggcgtcgtcgctgcgggacttctggggcaggcggtggaacctcatggtgccggccatcctccggccttcggtgtaccgcccggtgagggcgcgtctcggcgacgcggctggcgtcctcgcggcgttcctcgtctccgggctcatgcacgaggcgatgttcttctacatcatgtggcgtcccccgagcggcgaggtgaccgtgttcttcctcctgcacggcgtgtgcacggccgcggaagcgtggtgggcgcggcacgcggggtggtggcgcccgccgcgcgcggccgccgtgccgctgactctggcgttcgtggccgggacggggttctggctcttcttcccggccatgatcaaggctggcctggacgagatggtgctgcacgagtgccagggcatggtggccgtcatggagcagtccggccggtggctcgccggcgccaccaatctcaccttcgcgacacgctgaccagaggaaatgaaagaatgggacgtgagccacaccattactacgatctgacgaaacctgttgcatcgcgacgattctgacaggatgctgccgtttgtgattttttccgatttgggaaattaaatactcgagccgttcacatggccagcttggacagcactgggtgtttgcatcgtctgggggtctgggctgtgatgccagctagaattatgctagatcgatcgtgttaacaggggttaaagaagcattgattcggttggaaaatatctttaccattttttattgtacgttttcagctttgctatttatcaatccatttgattttttttcttattatcagccacctacactattagccctagttttgaacaacaaaaacctactatgttttcttgtatcaatccctgaattaaaagttggtatacacatttatagctagtagaaaatttcaaaatgaatttaggctaaaatagtttaatatctttacaaggaccaatagggtcttatcctatcagataagtagtagcggaaaccaaaatagtaataggcccaagcgacatgcccacaggcagttcattaggggcaggacctatttctcgatgagccctctgatcatctgctgagtatggcatattgttggcagagtctccctcttctactactgttatgtttaaaaagggagaaaatagctatgtgagtacatagagtacttgcaagctaccactgcaacatgattaatgcacattggatttaagaaagggcttgattcttttgctcaaaaccagctttcataaatattttaacaaacatttgacctagccattctaacaagaaaacaacggtaagttttcttgtttaaccattcactgagggttgcgtccacattcctaagtcttacttgattcggtttatccccaggcacatttatctatatttctgccattggaccctacactaaccctggctagtcccaccattcatccattcccattcacgccctaagtcaataaaaagtatataagtctagttaagaacagtacaaatgacggcgcaaatggctaaggtaccgcaatcttatggtggccataatcctctaggtctatgcccatatgcccatataggaagatacgctcgtacttagatcgtttccttcctatttttctaactcagtccttaactaaccagggtcagcactagcctttgctggaatccaaacaaatcttcttgttgtgattaagttttgtttttccataaacaacttcacatgtgtctcacaagatagtcgctaccatagcgatcttcccaaatcacattatcacatggctaggcatgtgtcaataatttgactacgggctttaatatatccatggttatcaaggtaaaggtaagcaataccaagatagggttaatcaataattaggtacgcaatttaaatatacttcctccgttttacaatgtaagactttctagcattgttcacatacatatagatgttaatgaatctaaacacatacatatgtctagattcattaacatctaaataaatgtgggcaatgctagaaagtcttacattgtaaaacggaggaagtagcatgcagtttatttgaaaacaaaatatttcgcaacataggtacaacatgtatcaatcctgattattttctatagatgttcacttttctgtagattaaccatcaaagtttgtgttctaagtgaatgtactttattttccttagcttatatctagtggccaaatctcaggttgattgtttgttgctttcataattaacaattcaatgttttatccttttgaatgatattttccatgcttatggaaggcttaatgaactgaagtttgtgttggcagtgatctccatcagatgtcctgtctcttcagcaggtcgtccacgatgcaatcagcacatgaggcaacagttccctccaacccacctgctgaaggcttggtttgcctaatttgattgctacatgcgaatgaggattacgccgtgtagattgaggtgcaggtaagctccatttcttgctgtcaattttttcatgccatttttgtgaatgctggcgatgggggatttttgttcatggagcaacaatgtttttattttccttttgtcaggccatatggagatgcagtcgttttcatttacagcaatcctcaaatccaggttaatattatgtggattttatctcttttgtatacattaaatatggcatctacagaaccaggattttacctctttttttcttgcttctgttaatgaagataagaaatatatcccatgtaatcaattggggatcaatgaggtttagtttgttgtactgctaatgaatgccatgtttaatttttgaaacgttacttgttttgttagtacacatgcatggggatgtgaaaagatgactataattgaaatgtatgtgctacgaacaactctccatcatcaccatacgtgatcactgcgaataatatcttttgataaattgatctatgaagtttggtcggttccaaacatatatattatcacaccattgatttaagttgatctatgaagaacatttctttcttgatttatttatgcttcctttcacaaatttttgaccaacatgatatgattagggaggtgataaatgctgaccaactgaaaaaatgtcactgtattctgcattttggctcagcttcatcgttgtcactgcagctcatttttcagtagatagaacatattgtcactacaaactaatgatgccgttagcgatcatccagttttgcaattcaatggtgttgttagtagtaatccattcaaagcataatgaaagaaaaaaaaatgaccatttgcataaacactaacaaacagttgcgtgaccatgacaatctgtaacttgtattttataaacaaattcactcttccgtagcttgtttcatgagtatttttgctttaagccatttttcttagagctttatccctatcactactatctaatgcttctaatcatccaatcgtaaactggaccaacaaagcaatgatctgtttgcaccaccgctaacaaatagtagcatcattttggataaatgaaaacatacctgaattccctctgcttataaaaaagagatagcgtggcttggtgccaacgtgcaagagcacacatttagcacgcaaggatggcaacgggatcgtaaacaatcctcggcgatatatatatgtttcttttttttgttactggaaagtatttgttgtatttgtcacactcacaccctttaatttgattttccaaccgaatctatttatgaactgtacagatgaagaatgtagcaaaacaattggaaggattgtgttggtatgcatttcccgtgatccactgcaccggcaccagcgacacgtgagatcctcactgctaccccaacttggaagatttgtgttttgcttcccagggttatgcctcaccagcactggcacctgcactagcatcaggtgagatgctcacagccattgcgcctgcaccagcgctggtgtccatgcatggattttccttgtttgctgtacttgtgtctccattgcttgatgtggcgcttgcagacgagtaatccctccatccctaactatttgacaccgttaatttttttaaatatatttgaccgttcgtcttattcagaaacttttgtgaaatatgtagaattatatgtatgcataaaagtatatttaacaatgaatcaaatgataggaaaataattaataattacattatttttttaataagatgaacagtcaaacatgttttaaaaagtcaatagcgtcaaatatttagggatggagggagtacaatccatgcccaccatgtgtttgtagaaatgccaatcaaataaaatgcattttattctccaaattcctaagctctcttttctcacacactcactccatgacaggtttcttaagacatactaattctcttggtatgcatttcatgtgttggatcagacttggtggcatgaaaccacaattcgaaggcatcattaaaaaaactgagtttatgatttgcggtaccgccacccgttgaacttggactgatcttatctctgtcacatatgtgcaccaaacgaattcagtttatgatcatcctaatgacagtagttggagaaaagagtatggacatgtaaaatttgcccctttgcattgagctatatattttcgcacaaaattttttacacttctgcttcaccttgctatgacctgtaggttgtcagccaactatgcaagttggcggtgccacactactgcaatggacacgcgccatctacaccattaacttattttcctgtcgttctccatttgccctgcggcaaggtactttatttatcggttatagttgtcaattgtaaatttacttgcatatgttgtatatgaagaggtatgcttgccgacattactaacttaagtttctggaggaagttagaagacaacgtgatagggagaggtatgcttccctcactgtatttattcatatcgtgcctagagttcagttcacaggaggtataaataatggaaaaagaaggttgaccgatctgattgaagttgatgcttgattctaaatgggatatgtttactgtgctctccagttcctcacaatttttaagcagcaatatgatagtatgctgtcatttctatttaagtaaaaaaaattgattactacctcgaaccacttgctttctagccttaatatggaccattatatctgcagtatatattagtgttagtttgacacctcaatcatattatggcctatggaacctgatttttggacttattgtgaatgtctcttgtggagatgacatatttcacaatctgtaataggtacagatatgtactgcaaaacttccataaaagcatcttcccaaatcccaacatatctttttctctgcagaacaatttagggcctgttttgatcccctagcaaaatttttcaccctgtaacatcaaatgtttggaaacatgcatggagtattaaatataggcaaagaaaataattacacaaatcacgtgtaaattgcgagacaaatcgtttagaccatggaactttaattttagttgttacctgaaaacttaattggtagtgtttacatcattacagaaatttgggttcaaaaatcttttgtgaattattgtttctttccaatgttacagtaagaataattattccatttgatatatgtcgacgtggcttgcacctacacactaaatagtttatgtacttattttaattattttcctcaaggaaaagtagtaagccactgacagctgtggtcggggtcaactattgacagccacggtggccagcgggcccacacatcagcgacacaaatcctaaacatggtttatttgctattcttaattacttaggacccacatgtcagtgtaatagtcttaatgaattgattaacttaattaccttcattagtcgctaatcaaggaggaccacatgccatacaaaggagagggatagggatttatgtcacgacacctgacatgcctggagatacataacaggaggtcgagccgaacatgcatatgaatgctaatccatcgatgctgcgcaagtctactcgggagagtaggcctaatagtaggtattattcaagtgaatggacccagtcgaaatgggttgggccatgtgtgagggagtgaggtccatggcgcgatgctataagagaccgatagggagttgagacagaatcgaacattgtagaaacatattctgaatactgaattcaaatctctccctgttctatgttgttcttccccaaatcccaaattccttgctacttctaccctcaattctgttcaattcttccttgttgcgacattgcaaatccagtgtcgtgacaaattggtatcagagcagtcaatcctggagaagccgcgctacacttcacggttgcaattgcaagtagtagcaatggagaaacagaatattgacttcggcaaaattctcggagaaattcaggaatcgctggtgtctctcaatagtcaataccaagcaatcggagactcaagcggctgtatcgaagttggatgtagggtgaatgggtggcgacctcaagtggaatccacaatctaggatttgcatgaagaggttggagatcttcgtcagcaactcgacctcatcggcaaatccaagcaggctgcttcgagcgcgtcttccccttgtgtctcattggcgggtgaggaaaggaaggaggctgctccgagcacgtctttccctcgggtcccgttgacgggcgaggaaaggaaggcgccattgctgccgatgccgccactgacaactcatttggccgcggcggagggtgggagcaaatgggcaatcggccaccacgttcaacctaatttccggggaaagacaccgggggccttagcgaccctgggtcaaaccccgggcaagggtacgtatgactcgaatcactttcagttccagaagtttgagcattcggggtttgatggtggggaatttgattctgattttggggagcgacaatacaattatagagtgccgaaattggattttcctaagtttgatggttctaaccctcaggattggcgaatgaaatgcgagcactattttgatgtgaataatacctttccggggctatgggtgaggatttcgatcatttatttcatgggtagagcagcatcatggctaagatcttctagggcgcatttgagatttccaatgtgggaagatttttgcactgcagtttctgaaaaattcgatagagaccagcatgaggctttgattaggcaaatggatagtataaaacaaactggaatggtgtgggagttttatgagcaattcgatgaattgatgaatcagcttttagtctatgacccctctgctagctcaaagtactgacacactgttttactgaagggttacgtcgagagattcgtaatgctgttcttttacaacgtccaaagaatctcgagactgctttggctgttgctttgttacaggaagaggtgctggagaatcctcaaaactctagcatcaaggacataaagaagtctgaaggaaattcagcttataagtctgctgtgaagggggcatggccattaccactaccaccaggaaaaggaggagttccaattgttggccgttctgaagacaagaggagcactaacagtgttcgtaatccgagaacaatgtctgataaggtggcagcattgaaaacttacaggcgggctcaagggttatgctatgtttgtgctgagaagtggtctccaagtcgtaagtgtgctccatcagtgcaattgaatgttgtgcaacaattgttcagtctaatcttggaagagaacttgcaggaaggaccggaaaattcagatcaattgaattctgaaactggggaactaatggcaatttctctgcaagcagtgtagggatctgaacctgatgggactatgagaattttggggcatgttcaaggtaaagaattgctgattttagtggactcagggagttcggtcagttttgtcagtacgcagttagcttctggattgacaggattgcaaccattggcacaccagttaattgtcagggttgctaatgggagcaagctgaaatgtgaagcagtaattcctaactgtgagtggcatgtacaaggacatgtattccacacaaccttgagagtgttgcctcttcctaattatgacatgatactaggtatggactggttgaaggaacatagtccaatgtcaattgattggtttaagaagattattgctctcagcttacaaggaactcaagtgacaatacaagggtgtagtccgaactggctaagtgtaatatgatttctgcaaatgaaatgaagcaattccattagaggagagcaatggctcatattgttcagttgtgttccataaatgatcaaaatgtatctgacgaagttccaatacctgttcaggatctgatgaaggaattttctgacatctttgtggagccaaaaggtttgccacctcaacgacaatttgatcacaccataccattgctgccaagagcacaaccagtgaatgtgcgacctatatgtatacaccagcacagaaggatgaaattgaagctcaagtaactgaaatgttgcaaaatggcatcatccagcatagcaccagtccgtttgcttctccggtgttgttggttaagaaaaaggacaggtcatggtgcttttgcgtggattatcgacacctgaatgcgataacggtgaagaacaaataccctttgccaatcatcgatgaattgttggacgaattggcgggtgctcagtggtttacaaagttggacttgcgtgctgggtatcaccaaatccgtatgaaggttgaggacgagcataagacaactttccgcactcataatggtcactatgaatttcgtgttcttccttttggattaactagcgcactagctacctttcaaggagtgatgaacaacatactgtgctctctcctacgccgttgtgtgctagtgcattggggcccaaacatttgggtttgtccacatacaagaaagagagcttggcaataatgttggcagtggacaattggcgaccctatttacaacatgctgaattttctattcggactgatcgccatagtctggcatttctagatgatcaacgccttaccacaccttggcagcataaggctcttactaaacttcttggcttccagtacaagattgtttataagaagggaatcgacaatggcgcagcggatgctttatctagatatcctgaatctgaggtcttatcaactctgtcagtttgtgttcttatcgcggttacttgaattgttatctgctaactctaaaggttcttctccccgtcaagttttgaactggcgatgggtgcgcaaaggggcgaagtaggtggaacaggtgcaagtctgctggtccagccacgattcgtcggttgttacatgggagaatcttcatgaactccagcaacgttttcccaatgctgaagcttggggacatgcttcatttcaagggggagggaatgtcacgacacctgacatgcctggaggtacagaacaggaagtcgagccaaagatgcatatgaatgctaatccaccgatgctgcgcaagtctactcaggagagtaggcctaatagtaggtattattcaagtgaatggacccagtacaaatgggctgggccatgtgtgagggagtgaggtccatggcacgatgctataagagaccgacagggagttgagacagaatcgaacactgtagaaacatattctgaataccgaattcaaatctctccctgttctatgctgttcttccccaaatcccaaattccttgctacttctaccctcaattctgttcaattcttccttgttgaaacattttaaatctagcgccgtgacaatttatccccgttcttccttgtcacagttctctgcttgggcaaggcagagacgcaaagtgcgtgggcggcacgcacgccgggtgtggcggcgtggtcggcctacggtgccctgcgaggggtcgctggaccactccgctcgtcaagtgtctccatggtggcgttcatgcgggtggagacggcctgacgcaacggttcgaggtggctcgggcggtggtggtggcgcaatgaattcgagagcaagagcgcgcgattgaaaggggagacctgagttcgagataaggggcgaaagaatggattagccagtgaacactcaccttgcggcgaccaggatacagcgtgccatggattggggtcggggccatcatcggggcggggatgggcgtcgttgtgggcatggacgtcgtctccttctcactgtggcatgaggttcatcaagtcatgactgcaacgacgacgtctcctcgtagtcctgaacggcgaggcctcctctttgttccgactgcatggcgatggctcggttgcgggagctagttgcactcccgtagccgaaccgatgggcggggagttggagagggatgggggaggcctcgaggtggccggtgaaaggtggggaggatgaaaggcttgaggtgaagaagggaaagaatgggggaggtgggtgtgtagatggcagcaatggcatcctctaattttttggcgcgcgatgagctcggccattgccccttttccagggatgtaggtcccctgcagtactacatgtgcaacactgctcactaacatgtggacctgcagttctgcaggggatctcaattgcttttgcagagcgaggatggcatgggcaggagtcactggggtgaggccggcatcagaggcgtcagggagaggatgtcatggcaccggctaggcggcagggatagggttcatggcgacatgcagcaaggacgggaaagacgaccacgggtgattgggaaggcggctgactctctggcggtccgttaccgtgctcgtgtgcggcatgcccatgcggtttttcgggtatggcggtggcgttcgatcttgctgtcaaaaggcagcatcggtgtgtgccaaagaattatgggaaaaaaatatcattcctattatttccataggttatattttcgttattttctacgtatacaatttggcaccaacttctcatgaaaaaaagatgagtaaattgcattggcagtacaagaacttggaaggtgggtgcgattaggtgcaaaaatttgaaaaccaagcatagcggtacaagaacttgacaggtgaatgcgattaagtgcaaaaacttaaaaaccgagtatagcggtacaataacttggctaggtgggtgcgctcatggtgcaaaagttgccacgccattgttccacctcagcgaaagtgccacatgagcatgcattgaccatctcattttacagaaaagtccctaataacttttatattccaattacttcttcagatatgtccgttttcctcctgtatcacaatgatcaaaccagtccatcttctcatccaaataaattctgccaactccaaaaaaaaaaatccaccacgatacagttcaattgtgaattcttcttcctcatgacctgcaatacaaaataattggttgatgtgttataccgcataaggaaaataatacactaagattatttgcagattattcaactaattatatctgctgacaagggtacaacacatctagcaagaatttctcattgccaatgtttctcttatatcatatacagttacaggaaacaccaataattacagtaaaaccaatctagtggctagtaccattagatcacttcattgaattgtaataacaaataacaggatattcaagtgaaaacccaaaaaaatgcagccattgtacagatcaatgaaaccttaacttcgaaatcatccatcaaatgaacgaaaaatagaaatctacaaccatcagcaagtgatttaccataacaagctaggagcagatgctccgaaaactcgtcgattcagaaccatcccaaagcttgcggtgaccacgtcgacagtagcaaattgttggcttgaattggtttggttactggtttagggcttgaactaatctagcacacgaagccctcgccgccgccgcgatgtaacggtttccctcgttgtcgtcgtcactgccgccgccaccgtcgctgcgccgctatcgccagcaccgcagccgcctctcaattaggaacatgtcaagaaagatggaaggagatatgcatacgtttgttctgtttgtcgagttaaaaaggaaatgtgattggaacaaaaaaaaaaagctatttggggttttctataaaatgagataggtctttcatatcaaagctgatgtggcaattttgctaaggtggaatagcaacgttacaattttttttacatggctacttttgcaccatgagcgcacccacctagccaagttattgtaccgctatgcttgattttcaagtttttacacctaatcgcacccacctgccaagttcttgtaccgccaacgcaatttactcaaaaaagattataggccgatagaaattaatagatagcaagtggtgtatacataatttctgttgcacgaaagacgattaaagtgtatggtccgatccaccaaccgtagatcatacatatctttttcacattggacatgctccacgacaggcccaactagagcaacaactctaggttctaggcttacataaacaaaatactagttgatgaatgtccctcccttttaaattgtgctcgcccaacatcaattatcgatgtgtcacacatcagacctagcaatctccctgtcacatcaacccatgtgacctcgaagactggttaaccaggtcttcttctccatcaaaaccttggctttcatacaacttgtgaaaatgttcaacccggctaaccaaccatgggctactcatatcacattgggtctattccaacacaggctcaaccggagtcaccactttaggtcctattcttaaacaacccaaaggactagtcttatgggtgagaattgccttcaccttttaagctaagctcttctatcatcaattatggatgtgagtctaaacccaacaaaaacaatctgctgctattggttgcttaaaaggcatataactattcacatatggatgccatactgccatcccagtcctagacaacgatttcttaacatcataattaaaatagagttttctgtcacaatactattaggacgactatgtcaatttcagtcactaattgacaacattgatggaatgaacatttattcagcaaattgtcgcctgagttacagaggcgaggtggtccagttgtcgtcttacactcccgcgcatgatcaacttatttagcccgtcgtctgagcttcgctcgtagtcactcgcttctcagttctctcacgctggccatcatgcaccacgccgtcgtcaatgttccggtggcggtcgccgctgccatgctctacgccctcctcgttgcctcccacctagctccaggaattggccgcctcctcgccctcaccccggtgcttgcccttctcctcaatatcacgttcgctatcccctgctttacggcgcccgcggcaccgcggccttcttcctcgtctggctgggtgagttcaagctcctcctcctcgcttcgggccgtggcccgctggatccctccatccctcctcttgcgtttgtcttcagcgccgctctcccagttaagctcatccgagtgccctctgatgatgccgtggtcacgaagcttgcgtctatgcctatcatgtctctggccatcaagcttgccgtcatggcggtggccatcttctacctcctccacaaaaagaacgagatccatggttatacggccttcaccatctacgtcgtcctcacgtactgcttcctcgacttcctcatgccgtgtgttgccgcggtgggcgccgcgcttggcatggagctggagccgcagttcgacaggccgtacctctctgcctcgctgctggacttctcgggaaggcggtggaaccttatggcgtcggcgatgctccgcccggcggtgtacgaccgtgttagggcccgcctcggtgcaccgggcggcgtgctctccacgttcctcgtgtctgggctgatgcacgaggtgatcgcgtactacatctccttccgcgcgcccaccgggcaggtcacggcgttcttcgcgcttcacggcgtgtgcatgtgcgccgagaggtggtgcgcgcgcaggtgcaggcggagcccgccacgggtcgtggcaacgctagctgctcatcgtggcactggtggagaaaccatctttggtcggtcggccgaaattcacaatagtcccggatccatttaaaaccgggactaaagatgatctttagtcccggttggtggctacaacgggcatatgtgatctttagtcccggttggtcacaccaaccgggactaaagatgatctttagtcctggttgtagagatgtcagacgttgtcagggccctcgggatctttagtcccggttggtgtttccaaccgggactaaagatcacggcgatctttagccccggttggtaacatgccttcttcctcctccagcccgagagcaagcttcaaaatttctcaaagaaagaggggaggtcatgccaaaatttcttgtgaaattttttttaatgattatatacaaatcggaagtgtctaaaaggttagtaacttcatcctccaatgttttttgttgttatattacttttggagctatgtttcacacatttttttttgtctccaaaactttgttgtaagttgatgagagagaaaatttgtgtggggaagaagaatatatagaaattttattctcatagtttaaaatatgatggaaattaatcttaaaaaatagacaacaaactaaattgaaaattaagagaagtacaacattaatattagtttagaacttcaaaaattgttaataagaattgcttgtcgaaagagtttttaattattttatcattactgtttgactgtcattattgtacgaaaatttatttatgtacgattttttttcatttgatgtagatggatcggcaatggatgtacgctgaccggcggtccaaagagtttatcgagggcgtgcattatcttttgagagtggccgaagctaacaagcgtaacggttttatttgttgtccatgcaataagtgtaagaaccagaaggagtattctgcatccaggattattcatttccacttgtttgagtcggggttcatgccaagctataattgttggacatcccacggtgaggaaggggttgaaatggaagaagatgaagcggaggacgagaacattcccgactgggctcagtacgctggatttgaaggaaatcaaacgggcgaggtggacagggatgctggcgataacgacactgcagatgatcttggtcagatgttgcaggacgcaaaggaggactgtgaaagtgaaaaggaggcccataaattagagcggatgttagaggaccacagaacatcattgtccccaggttgcgagcgggggcacaaaaagttggataccactctggagttcttgcaatggaaggcaaaaaatggtgttagtgacaaggcatttcgcgatttattgaaactcatcaagaacattcttccggagggaaacaaattgcccgagacaacgtacgaggctaagaagatagtctgccctctaggattggaagttcagaagattcacgcatgtccgaatgattgtatcctatatcacggtgaggagtacgagaacctagaagcatgccctgtttgtaaagcactacgatacaagattagacgagaggatccaggtgaagttgacgggcagccaacaaagaagagaattcctgctaaggtgatgtggtatttccctataataccacggctaaggcgtttgttcaggaacaaggggaatgcttgaatgatgcgttggcacactgaagaacgtcaacaggacgggaagctgagacaccccgccgatggttcgcagtggtgaaacatcgatagaaaatttaaatactttggaaagacgcacgaaacatacggtttggtttaagtacggatggcatgaatccttttggagagatgagcagcagccatagcacttggcccgttacgatgtgtatctacaacctccccccttggctatgcatgaagaggaagtacataatgatgccgattattattcaaggccccaagcaacctggtaacgacatcgatgtgtacctaagaccattggtcgaagctcttaaactgttgtgaaaaaaggaaggtgtccccgagtgggacgaagataagcaggaggagtttaacctacgagcgctgctgttcgtaaccatcaacgattggcctgcatttagcaacctttccgggcagtccaacaaggggtacaaggcttgcactcactgtatggatgaaacagaaagtacgtatcttaagcactacaggaaggttgtgtacatttgtcatcgtcgattccttgttgcaaaccacccggcactttgaacataaggcagaccaccgtacgaagcctaaacatcgcagcgggaaaacagtgtttgctatggttaaagatcttaaagtagtgtttggaaaggggcctggaagccagcctatagagagcgaagatggtcacgcggcgatgtggaaaaagaacactatattttgggagttacccttttaggaattcttggacgtctgccatgcaatcgacgtgatgcacctcactaagaacctttgcgtaaaccttcttggtttcctaggtgtatatggaaagtcgaaagatacactagaagcacgtaatgatctgaagcatatggaacaacgcagcgaccttcacccggaaccaaaggagaaaggaagccattacttgagtccagccagctatactcttagcaaggcagagaaggaaagtatgtttgaatgcttggagagcatagaggtaccgtctggatactccacgaatataaagcgaataataagcacgaaggagaagaagttcacaaacctaaagtctcctgactgtcacgtgttgatgacacaactgctaccagttgtaataaggggtatccttccagacaatgtccgggcaacaataacaaagctatgtgctttcatgaaagcaaatttgcagaaggtcatcgatccggatagattagaagcccttcagaatgatgtggtgcaatgtcttgtcagttttgagttgatatttccaccttcatttttcaatataatgacgcatctgctttgtcaccttgtcaaagagatcggtattctcgggcctgtgtacctacataacatgtttcctttcgagaggtacataggcgttctgaagaaatatgttcgtaaccgtgctcgtccagaggcaagcatcgccaaggggtatggaacagaggaggtcatcgaactctgcgtagaatttattgaagaccttcgcccaatcggggtacctgaatcatgccatgaagggagactacggggaaaggtggttctcggaaggaaagcaagaatgacggtagacaacaatttattccgtaaagcccatttcacggttctgcaacaatcttcattggtggctccttacatcgaggagcacttggctctagttcgcgccagaaacatcggtaagtccgatgcatggattacacggcatcacattgatactttccccgcgtggctacgacaacatctcatgggtaacgagacgattaaccaacaactggccttcctggcgagaggaccatctggctcgatcgcgacattctagggatatgagatcaatgggtacacattctacacgagagccaaagacatgaagagcacgaaccaaaacagcgttgttcgtatcgatgccatgggacacgatggaacaactggcacgtattacggtgccatcgaggacatatgggaagttgactatggtccactcaaggtccctctattcaggtgccaatagattaggttgactggtggaggcgtaacgattgatgacagtgggatgacaacggttgaccttaacaaggttggatactcggacgaaccttttgtccttgccaatcatgtaacgcaagtcttttacgtgaaggacatgtctagcaaaggaaagaagggcaaagggcctgacgagccgaagcgccacatggttttcccaggtgttaacaaccaaaattggtaatgtcagcatcggaaaggaggattagatcgaagtggagtcgaaggcggagatcgattcgagaacagagcaagaatcggctggagtccagatcggctatgatcaggatcggctgggtccgagtcagactaggtgagctgatacagccgattctgacaacacgacttggtgtacaacatcgggttgagtcgatatgtttcaagatgattgccgcacatggatagagtcctgagaagtcaattgtatctattaattaggatgttttatgtaattttcttagagatatatttagggcaaaagtctgccgcaaagacttatggtatcttagagtttgttagagataagagtcgtgtccgatatggacatagtttgtaattttcgggtataaatagacctcgaaactcatgtaaacaattaacacatatgttcaatacaatttggcgcatcgccaccttttaccttttccactttattttatcatccggcgggacttggcacctgacgcggggctgcatctgtgttcgatctccgactaaggggtaagtccaatgttccgccggcccgggcaattgtatcgtctacgtcggtgtcgttcaaggctgcatcagtacattcgacctcttggattgctctggtttagatgatatatttgtctacctatttatcatatgtctctattaatctagtcttagcatatcaatttagctctatcggctgcttctcgctttagggtttctgccggtatcggctaaatcgcgttgctagattagattagcctaggcatctaccaccctgaaaactcagtcaacggcttgattgtctagatattgtgtttcttttcatacttagtgctgcatcagttaagtttgatctactaagtcgtgcttagaaccatattctctagcctgcttcttgattgccaataagggtttcatcggggtttcagccggtgagttatctggacgttgcatcggctcataaggattgcatatacatataagttggatttagccgatgacaacaaaggtttcactgtttaatctaatcttgtagatttcatgacatcggacctccagccgatgtatgctttaaccttcggatcgatgcttatttatcatatcattatttgtcgattggtttatattagattatattgttatttcattacatcgttatcagccgattgccttcatatcattatctacattggacatatagccgattgcttaaaccctatcgctatcggctggtatcgacatcgactattatcggctatcggctggaactactccatcggcttgtcagccgatcgactgttttgatctactatttgcatatcttgtcagttgcaggaacaaactgactggcacactcgcatctcatcaagatttggacctgcacaggagctaagcagatctcccaggccagtgtgtgttttttgcatcaacacaaattggcatgcccgatgggacacattagaagtcagcaagcggtttcttcatggtcgagaaaccaccatcatcaccgtcctcggctagcccaggttctattaaagagaagatccagaagttaggtttgtcagaggttaatgaagggaacattgtgaccatcgatccagagaagttcacacctgatcaaaagaatgattttgaagcgatgatgtagcaagcacgagaacagttcttgaactcgttcatgcagacccgcaagggagcacttgttcagaagtataaaataaaggtggttcctgatgaccccgggactagttcttccaaggatgacgaagggaaacaagctccagatggctcggctcaaccgagtgacaaaggttctacagatggttttccagcaaatcaaggtgacaacttgcaaggagtgcacggggttcaaggcgatggttctcaaggtgttcaaggtgatggtgttcaaggtggaggtgttaatcaagacggcaatgcagcacagttgcagttcaacaactttcaagattaggttgactatgctgtacaccatgctttaatcaatcaatttgggatattaactaatactttggcaaacatggtgaagtcaatggttgatggttcaatggccgagtatcaagctacaggactagtgtacttaccaggaggggtattccctaattatcggccattaatcaccgataatcaaccagtcatccagtcgattcctcttaatgcaccatcggctcagccggcagcactggtgtcgcttcctgcacctgctccaccaccttcggctccaggccaaagaataaatccctggttgttggtaagggaacagccacagcatgctggacagaatgtgaatcggctaacgcaagaccaggttgcatctatgttcttacctcctcagcacaccattgatcaaacccagcagcagccgattcaataaacaccgccaaggcagcaggttgttcaaccagttcagtcaacactcccaatccaacaggttgtgcaaccagttcaacagacaccacccagacgacaggtcttgcagccaattcagcaaacgccattaaggcagcaggttgttcagccgattcagcagcaaggctctatgaatgcattggctgggtttgcaacactgggtggtcagcctgggcagcatgctgcaaatcaagttattccagagcacttggttcatcacgtacaaccagatggcacagtgattcctcaagttattcctgagcatttggtgcacaatattcagccggatcttcaaaattactagggggcaatttgaattatcagtatcagccgccatcaccccaagttcagtatcagcaggcatgatcagctcaaccccaatttgttcctcaatacaaccaattcgagcctatgacacagcaatctcaaggaacacctcaacaacaacaatgggccgatttgattgcagatgtcatgaaggagctgtttgggcttaggccgaaagatgctggaaatttgtaccgacaaccctatcctgagtggtttgagagggttcctttgcccaatcggtttaaggtaccggacttttcgaaattttcagggcaagatagtacatcgacttgtgagcacattagccgatttttagcccagtgtggtgaagcatcggctgtggatgccttgaaggttaggttgttccagttatctttgtctggatcggcctttacttggttttcttctttaccatatggatcaattaacagttgggccgatttagaaaaacagtttcacaactatttttatagtttggttcatgagatgaaagtgtccgatctgacatcgatcaagcaaagacataatgagcctgtgcatgagtacattcagagattcagagagatgaggaataagtgctacagcttaagtttgactgatgcccagttagccgatttggcttttcagggtatgattgctccaatcagggagaaattctcatctgaggattttgacagcttgtcccatctcgcacaaaaggtgaccttgcatgaacaaaggtctgtccttatatgtatgggtcggatgatgaggatgatgattctgagatagctgtggccgaatgggtaaggagcaaaaaggttataccgtgccaatgggtaaagaacacaggaaaagaggagaggtatgactttgatatcaccaaggctgacaagatttttgacttactactccgggagaagcaaattcaacttcctactggtcacacaattccatcggctgaggaattgggcaagaaaaggtattgcaagtggcataattctgggtctcatacgactaatgattacaaggtcttcaggcaacaaatccaagaggctattgaaggaggcaaaatcaaatttgatgacactaagaggccgatgaaggttgatggcaatcattttcctgttaatatggtgcatacagctggccgaacagccgatgggggccgtgtaagaggttttcaggtaaattcgactaagattatcaacaaatatcaaaggaagtacgacaagcaacaggaaaagcattgtgaagaagatgatgatggctttaatcctcattagggctgtgagttctttagattttgttggaatgaaggcatgaggctgccatctattgaggactgtcctgggtgcagtgatgttggagagagctcgagccgatcatatagtaggggcaatcggctaaggcagatgagaattcctattcatcaaagattgggtccagtaaaccaagatcgtggataagaggacaatgaaaacatgaagactcaatggtgtccttctggtatctttatgaagaatcaaaagaaaagggttcaaagattgaggaacagagagcgcttttaggaagtcgagcaggaaatcaaccatcggatgaagaaaacaaagccgaggcaggagtggcgtgctaagaatcaagttctggtggccgatgaagccacagccgatgaagcaaaaaggttggctaaaggaaacagcgttgtaactgcttcggtcaacatggttttcacgttgcctaccgagtttgggatcaagcaagccgatatcgatgaagttgaagaagaatcggctaaattgattttgtcgccagagcaggtagtttttgagaagccagaggggacggagaatcggcatcttaagccattgtatataaatggttaagtcaatgggaagccgatgtccaagatgatggtcgatggtgggcctgcagtaaatttgatgccttacactacattcaggaagttgggcagaaacgctgaagatctcatcaagacaaacatggtgctcaaagattttggcgacaatccatcagaaaccaatggagttttgaatgtggagctgacagtcggcaacaaaactgtccctacaacgttttttgtcatcgatgggaagggttcttatagcttgttgcttggaagggattggattcatgctaattgttgtattccttcaaccatgcatcaatgcctgattcagtggcaaggcgacaagattgaaattgtgccagccgacaggtcagtcaatgttgccagtgccgatttagctctttgggagacggatggtcttgattgtttatctggaaaagattggggtggagattttctaaaagtgtccgattctgatatacagccaattgaaggagaacccaagctattattttgagggcgtcgtggagggttcagatgtctacaacaaggacacagtagatgatctcgatgacaaacaaggacagggttttatgtcggccgatgatttggaagaaattgatataggtccaggtgatcgaccaaggccgacatttattagtaagaatttgtctgcagaatttagaaccaagttgatagagctgttgaaagaattcagagattgcttcgcttgggagtattatgagatgcctggacttagccgatcgattgttgaacatcggctacctatcaaactaggggttaggccacatcaacaaactccgaggagatgcaaagccgacatgcttgaacctgtcaaggctgagattaaacaattatacgatgttggttttattcgtccttgccgatatgctgagtgggtttctagtatagttcctgttattaagaaaaacggcaaggttagggtgtgcattgatttccgagacctaaataaagctaccccgaatgacgaatatccaatgccggtggccgatcagctgattgatgttgcgtcagggcacaaaactttgagttttatggatggaaatgcgggatataattagatttttatggccgaagaggatattcataagacggcttttaggtgccctggtgcaattggcttgtttgaatgggttgtgatgactttcggcttgaagagtactggagctacatatcaaagagctatgaattacatataccatgatctaatcggctggttggttgaagtctacattgatgatgtggttgttaagtctaaggagatagaggaccacatagccgatttgaggaaagtttttgagagaactagaaaatatggcccgaagatgaacccatgcgttcaatacaatttcggcgagccccccaggtccgaaatatttggtaatgtttcgaatttgctgtatatcgactccgagcaagttttgcactttaccgttttccgaccgttacacccgtgctttaaatactaaccgtcaccctcgagaaatctttaccccgttacttccgtcttcaccgccgaagccaaccttctcctttctctctccggcgattcctccgacgctcgaggcgatccccaagcgacttcgtctccggttagatctccgcctgcgacgatgtcgtcttcctccagcccgtctaccgcgccatcagccgagtatgctgaggtaagttctcatcggctagatcccttttcctcgcataaaatcgattcctccttttctcattgtgttttcctcttcccaatttctttggatttgcagcacatttccaacctagttgcgatccccagcctgtcgcacgaaaaccactattttcttggcccaatcggcaatcttgaccccactgattttatcatcggtgaaaccaacagaatcccctttagactagccaaccctaatctaggtcactggaagaatactttcaaatcttggtcatctcttgagaaaaccacccctgagaagagttggaccacatggtaccagtgcatatcggctagtaagaaggttcattggaatgagatcgggatcggccaagcgcttgctctcaccatagccaaatctgctaaggacgaacctctgatggctgccgccacctatttctggtccaacaccatcaatgctttcttgttcaaccgagggccgatgactccaactttgatcgacattaccatgatcactggtttagatgtgacttcatcggctaatcctatgagcatgaacacaaaaaatcagttttattttagaactaaaagcataggtggctggtctggctatgtggcagcatatacgggccaagggtctgttacttctcgagagcatgtagctttcttgctaatgtggctagaaaagttctcttctgtggatccagctgtggccctacaaccaattggcaatttgtagctgaagccctagaatcaaagaaacaatttcctttgggcaaaatcctccttggctatctgtaccaaatgttgaacaatgtgtcggccaagatagccgtcggctcagtagttggtgcaggtggaccatggtggctgctgtaaacttggctgaatctgatggtcatgaaagttgtcaatctgccatctgtgacagaagctaaatttccattaccagagccgattgtggaaaatgatggagaagaacgcactcatcgcagatgcatgtcatacggagaatatgcatccacaccaattgatgctggagcaaaactatcggttgagctgctcaaagactggttctgcagcttctatgagggctttcagaaagatgcactggtttggttcccttatgaagattcagcagatcttgaacttccatcagactttagatttgaagacatcaattatgaaagatacaaaaagccagggaagttctcacagctgcaatcagcccatgcatcttacccgtaggcattcaccagggaagaaacatccaagtctcttacgagttttaccacccaatgagctcggctagacaacttggactgggccaactcccaatcggcttattctttgtcgacaagatccagtgccgaggagaaatttcatcaaccttaatgatggatcggctgctcaatctccaaggacctcctctaggcagtattgaaaatattgagctggcaggtttcaagagcagaaactttgacagatggtggggcgaatggaagctgcatttatttcaccaatcggcctcaatgtacatgacagatctattccctgatgttataccccaggtaaattttgtcattactaaactgcataacggttagccaattcattacttgactaatcttttgttcctgttttgcagacaacagagtcctcccctccacatcaaagcaataatggtagggacattgaatatgccccaggactaattccaaatggaggtggaccatcccctcctgtcattggctatgatgcccccaagaccttaactcttcttcaaggactcatcagagaaccagccgatacaggtaagaaaagaagaaccaggtcatcggcagcagatacattaactgtagctccaaagaagaaagccaaactcaagaaacataaaccaaccgatgatctgcctgtcctggatccatctattgagcaagctctggatgaagaagacattgatgatgatgttgatcaggctgcagccgaagtaagcgatacagaaaagacaccatcggcttcgcctaagcaaacacctccaactccttctgcccctactcacttcttaagagtaagcagctctctttgatcctttttgtaatcacctcattttcagccgatgaatcacagactttatagttgcagaaaaagaaagctgctgtgaagaagaaatcggcaacaacaattcgcaaaccggttccaccagcaagttatttaactctcttattaattaatcccagccgattttgtctaacacttgtctcttttacagcctcctcctcctccttctcctcatgtacagcaatcgtcaagtgaccgaactccatcggctgtaggaagtcatcatattgagggagaagaacaaccagctgctcctgctatcccagtaagttttccccttgatgcaagaaattagatcggctatatttacttagctctcaatcttcctaaaattgtccctgcaggttttagctgatctcttctcttttgacatcagagattatctcgatgaagcagaagaagatactttgagcaaagctctagcccccttacccgatgatgtgaagaaaacacttgaagatatctctcatcggctagaggcctcctctttagatagcttggtggtgaactgttagccaattaggactcggctacatgagatccaagctctaatcccagatgagcttgccgatatccttactctagcggtctatcttgaacaacatcaattcaagctagaaaaagccaagttaagactagccgaacgtcgggagcgcaaggatatcaaagctacaatccaaaccaatcgacagcttgttcatgaagagaaaaccaaacttgatcagctatctgagggcccgatcaagtccaatattgatcggctcgaagctcgcaagattgagctcttggcacaacttgaagaatgcaacgacgagctaggtatggaacataaaaagctggccgatctcccgaagtccatcgaagagcagaaagcaagactcaaataggctatcaagaatgttgctgatctgaccaaatctttgaaagtcatccctggaaccgatgctcaagatgcccaagctattgaagaagtagaacaaattaggcaaagggctatttctgctatccagcaatacttgtctcgatgactttttgtgtaataggccttagaaattttttgtaatcggctaacatactttagtactttactgtcttaacaatcctttgtgttgattaatacaacttctaacttcgctcaaaaattttcattttcattttttatacatacgtgcccccctaattttacaatgtcaaaagcattgataaaattataaaaacaactaagggcgatatagtaatatcggcaaaccacaactgattacaatatgaaaaaaaaacaagggcgatataataatatcggccatctcaagacgatgaaaacacatcggctatcatgtatcggcaacatcagccgatcatgcattaacccaaacgcttgggtaatatttcttcaagtatttgccatttagtgctctgccatagacttctccatcaagtccttgcaatatgtaagctcctttggatacagctttatgaatttggaacggtccttcccaattcggcgaccacttgccgaatttgctatctcgagtcccaatcgacaaaatcaacttcaatacaagttcaccttccgaaaaatctttgggtactaccttcttgttgtaatgccgagtgtcacatcctgatttttgtttcaggatttataaattatttaataaattattaatagaatttttattaaatgttctttaatttacaagtgaagttaaatgtgggaaataaaatttcctaaatataaagcatggatgtatttaatttttattaaattctccatgattaagtcaactctctgaaattttctcggatttttcggagctcaattcctaaatgatacaaagaacagttcagtaattatttgatcaataatgatctaattataattgttaagagcttttcttgtttaaaaatccgtaaattataaattgttgtttaaaaggaattattagaaatgattttaaaagcctaaaagagaagatctaattttaatttgctaaatctcaacataaaattgggctagataaaattttgttaaatactttgcttaattctataattcctagatttttctgggatttatttgagctaaggaagtatttttaataaatggaattgcatttcatgaataatttaaatagaaaaatgtttttaaatcctccttttggctttgggccgaaagccggcccaaaacctctctctttctctctccctccccggcccagtcggcccagtccgccgagctgccgctctcctctctctctctgtcgctgacaggtgggtcccacctgtcaggttcgtcttcctcgagccgccgccgccgcccgaaaccctagccgagccgcgccgccgccgctttccaattcggccgcgcctttccttctccggccgaatagattgaggggaaataatctcctcgatctcctcttccttttctcttatagaaactccggtcaatttcctttggaaataggcggattcgagtttgattctgattcgtttttccccgacctttccttctcgtcgccggcagccgtgggccttcgccgtcgcctccgagcccccttaaaaggacccccgagctctcctctacccatcgccaccctcgccttcgcctctcgtcgtccgtagagctctagcgccgtgtagcttttgcgcaaccgtcgtcgccgccgctccagccgtccttcgccattgctccagtcgtcgccatcgctcgggaagaccgccatcgtggtcgccaagtcgtcgccgtcctcgtccgccgcttcaccatcgccgaagaccgccggagaaccgtcgccgccgtagacccgatctatgccgccgcttcttcctcgtcgccggcgctgtccgttgttcctccgccgcttctttggtcaccggtgagttcgccgcgtcgccctctacccgttggtgcccttcgttcgcgtccttgtgccgtcgttcgccggtgagcttgcgccgtccgagctgccgagccgccgtcggtgctgacgtcatcgctgatgtcacccctgacgtcatcgtcgtcgtccgtccgtgagccgcggtggatccgttcgatctcggccgtccgttttggatagggttgatctcggccgtccgttcccgtgaaccgttgccgtgcacacggttcactgtgaaaccctagccgctgacgcaataatcctccttttccttttaaaaaataattcattattgcgtcataattcaattaaaatccatataagtgttttaatccgatttaatctttaaaaattcataactaattcattgtaactcagtttaatgtggttcaagttgcaaaaattatataaaataaagatctacatattaaaattatccataaattgaattaaatttatttagttctttttaaatgggctttaaatagatttaatcttgtaaaattcataataaattcatttgaagtcagaatgaggccgttcaagtctcataattcatctaaaaatatgatctacatgtttgtttactttttatgtattgtttatttggtttttattagtctttttcttcgttttgcgtgttagcttgtcgtttccgtcgttgtgaaggttcgcgagtgcgtcggaagtgttcaagaagattaattgaagaccgaatattgcaaggcaagtcacacagatcctaaacacaatcctttgagcatgttgatcctatatttaaattctctatttatttcaactgtgcatttattttcgaatgtcactgggtggtgtgaatctattcctttgttatggcctgtttgcattgattactttaatccttgataccttgagttattataatttgaatagttgagctttatatattggttcagctagatattagatgtgattgcttagccatgcttagaaacattagcacactattgggataacttatgattcattattatttaatgatggtttattgatagttcacgatggttaatcgtgattggttaattaattacttgccaactaaaacttgataatggtgggttgtgagcacatggttttgacagtcgtgctcatgacaattaaggaccggttcgcgagctactattgtgaaacattaaccgtgccaaccacaagccagcgtgggcaacggctttaccttttgtatagcatgattcattgcggagcaccagactgagaagtggcggagataagcccacgggggtcactggggagtccatgcctctggtttttgaggggatgattatgatccaggaatggtgcactgtggtgagttgtgttatgcagagggtattgtcacagcctctattcgggtactttccagtatcgcgacgcatggtagacatgatgttgaggctgtgtcttgtgggtacagtggtacacctttggccagagtaaaactattcgaatagccgtgcccacggttatgggcgagttgagcaatgtttttcgtgattagtcccacacctctcaccgtaactatggatgttatactgggtaataatttgcttagctcctggtttggagttagatctgttcagccgggtatggttgttcagaatggttgggcctgtgcagcatgggtgtgctgttcagtgttgattaaaatttctgattaattactccactgttttacttctcttaaatgttttgctaaatgctgcttttgcaaatgagcctatattatgccatcctttggtatccttgtgcacttgcatatttgctgtgtggcttgctgagtatgtcatatgctcaccttgcaataatcaatcaacctcagttgaagaaaaaggatccagaaggagaagacgtttggcttataccccagttgagctgccagtgggagtggagccggagcttcgctagattttattttccgctgcagttttcttcatgatgaggactaagtgcctcataagtaagtatttatcgttttagttaatttgatgaatctgtatattaaattgtcagtttgtgtacctcggctgattcctggacgaggattttatgcacaaataagttcggaaattactagtgaatttccgggcgtgacaccgagcaactcattccttctctttagtaacttttgcaagggctcgcaaacgtgactgaactagatcaatacaatttcggcgcatcgccacccttttgctttagttttatttcgacgagttcttgcattcgggttgagctacatcggtttcgatcttcaacaagaggtaaaacttgttatgacagcttgcgttctcgggattagtgcttccatctttatgacactctaatcctgtttatgtaattcgtcgagttatcatatatcttacataatctttggcaatctcgctatctaacctacaatcggctaacatctatcggtagagggcagccgattaggttagacaccgaagttgacttagattatatgagatatctaccactctatgaaacttccagcggcttgattgtctagatattgttcttgtttttatacttaatgctacatcagttgagtttgatctattaagtcgtgctagaatatcaatctctagcctgccatctggctgttgattagggtaacatcagagttttagccgatcttatctgatttaactacatttactctatgtgttttattgacatgttaaatctgccatttatgtaaagatcttatttcatttaagtatattaggcttttgtttggtatattctattcgttttaatatcttaacatagagttgtatcggagtattagccgatacatgctagatctatatgatcggctatgctacgaacatatataatcctggtattaatatatatttcgatctaagtgatttatactgtctcggcatggcgaccgatctatcccaatcgcttgatttaagtatatatcgacataagaattatatatttctaatatctatagccgatcgagtagatttagttctttattacctatttacaaccgccgatcaatttacatatgacatcggctcaaagatcaatgatatgtcaatggcacttagccgatcggctatcgtttataggtttaaccgcggtttctttgttttgatatcttgttgattgcaggatcaaatcaactggcacgctaacatacccgaaggcgagttttggacctgcactggagttaagtagatctcccaggtctcgtgttttacgtcaacacgcttttggcacgcctggtgggaccacgaattttatatccacatgtctgaagaagaagtcaatgccaagatcatggtcacggtggagagtttaatggaggaacaacaatattggctcagggggcaagcgcatcagtttcagcatggtggagcacatcagtatcggctcatgaaagccgattgcaagaagcaaaggaagatcggttttggagttatcaagacaagaaattttgaagcatgaattctcatactccaaaactgctgcgcatgtgttaacagtgaaatttggtaagcccggagtagtcatcggcttagagtcagcatcggcttcgaagtcctgcgattagccgatgagagttgtcaagtcgtcagttgtgggattattgctatattcggttaaggaaattgatctactaatggaagcttatccagaagagaccgagttcaaagagaatgtggcatggcaagttatctattaattaggaatagtttgttagtatccttttatctttaggaaagtgtgtttagtgtcctataaggactttatcttttccttttatctttaggaaagcttctttcttgtccgacaaggacttgtatcaacccatgggtataaatatgtacacccggggtctatgtaatctatctccacgatcaatacaattcggcgcatcgccaccttttaccttttccactttattttatcgtccggcgggacttggcacctgacgcggggctgcatcggtgttcgatctccggctaaggggtaagtccaatgttctgccggcccaggcaattgtatagtctacatcggcgtcgttcaaggctgcatcagtacattcgacctcttggattgctctggtttggatgatatatttgcctacctatttatcatatgtctctcttaatctagtcttagcatatcaatttagctctatcggctgcttctcgctttagggtttctgccgatatcggctaaatcgtgttgctagattagattagactaggtatctaccaccctgacaactcagtcaacggcttgattgtctagatattgtgtttcttttcatacttagtgctgcattagttaagtttgatctactaagtcgtgcttagaaccataatctctagcctgcttcttgattgccaataagggtttcatcggggtttcagccggtgagttatctggacgttgcatcggctcataaggattgcatatacatataagttggatttaaccgatgacaacaaaggtttcactgtttaatctaatcttttggatttcatgacatcggacctccagccgatgtatgctttaaccttcgaatcgatgcttatttatcatatcattatttgtcagttagtttatattggattatattgttatttcattacatcgttatcagccgattgccttcatatcattatctacattggacatatagccgattacttaaaccctattgctatcggctggtatcgacatcgactattatcggctatcggctggaactactccatcggcttgtcaaccgatcggctgttttgatctactatttgcatatcttgttagttgcaggatcaaactgattggcacgctcgcatctcatcaagatttggacctgcacaagagctaagcagatctcccaggccagtgtgtgtttttcgcatcaacaccaggcaaaagaaaaatcgttggagtagaggacaagactgacgaggattacaatcagttggatgggcaaccccctttcacggtgacgattgaccctagcatcctcctatcaaatgaagacaccccttactcacgtagcgatcacaaggaaggaacaatagtgaggagaaagtacgtgcggtcaaccgtcaccgccgatgtattgccataattattgtgtacacgatgtaaactattttggatgtattgaatatccatataaatcaattgttgtatggcatatgttaattatgcatgattattagaatttttaacaattttaaatcatgtgtgtgttagttatatgctagttatatgctagaatttttaaaaatcatgcatatgctaattatatataattattagaatttttaacaagtttagatcattcatgtggtatttatatatgttaattagaatttataacaattttaaatcatgcatatgctaattatatatgattattagaatttttattaattttaaatcatgcatgtggtatttacatatgttaattagaatttttaacaatttaatatcatgcatatgctaattatatatgattattagaatttttaacaagtttaaatctttcatgtgcttattacgtattatccacttaatttactacagacaacaagaatttttcgaagtaattgtcattaatttttcgtctttaaataattttaatgcattatttactattttagaaacacatatgtaatgaaattcaatattcagtgctattatctgtagtcccggttcttaaccctaaccgggtttaaaaagaatttggaaatagcgggaaaatatctttagtcccggttgttctcaccaaccgggactaaagaactaggagtatatatattcccgatgcgcaccctcgtattctccaccaacacttagaagttttttccccgatctcgatcggcttctccttcgccgccactgcctagggcatccccgcgccgacgccgccgtcgtatctcgccgtcgtctcgcaagcgtcatcgtcgccgcctcctccgccgccgcatctctatggtgagagccgccgccgccttcctctctctctcgacctcgacctctctctctctctccaaaccgccgccacctcgttgccgacgccgctgcctctccccgagggggatcgagcccggggtgttgcggcggctgccccctcccagcttggggttgggccgcccccaaacccacgtggctacccccgaggggggtcgagcccagggtggcgcggcggctgccccctccaagctagagggaggaggccgccctcgcttggggtcgagctgccccgaccccctccacgtatcagcccacgtgtacagggcctaacgcccacctaactgcatttaaagcggtctatgcaaccgtgccatgccgcatttaatgcggcgtgctgtgcatatgaccggtctgtgaccggtggaatgaccgatgggacggcgactgtgtaccccggccctgtcagtgtgtcacgcggcgagcggcgtgcttcgtcccgtcgcatcataatgatgaggggcttcacagcctcttacccgggtcagagctggtccaaccactctgaactaacccgggttcccattttctggtgtgaacgagaacccggaagttctcatccattaaatggcgaatgacaagggcgccttgcatgatttgatgggccccgcgcagtaaccgacgtgcagatagcttctgggctaaggcacaagacatgtaatgaatatagagaatattttcccttctccctaggtagcactcgcagcacatgtggtatccccttagagtataaaagttggaccatgcctagcgaggaagggggatcggactgaggatccctgagccaaagcttgtctaaccctagcttgcataccagggattcagggactttttaagcacagaagaatcatacacacaggagtagggtattacgcttcgtagcggcccgaacctgtataaacctcttttgtttcatcgtcttggaggagcctccaagatcaagatcacacacagtttcgctcaccaaatcctcgaatctcacccgctacccccggccgaactctcaaagggggggcctcacagcctcccgctagagagggtcaccccttgacacgaggggacaagtgcggcggccagcgagccgcgagggaattgtggtcatgcatgctttatggatggaatgatggatcaatatgtgttcttactgaaatttttatgatgctattctaagtattcatgctattttttatggtacatataatatttgttcttgctgaattgatgattgtcttgtatttttggtgcagattggatggagatgctacctaatgtgggtccccggaagggtcggggacaggggcctgatttggccccacatctccagtcaggaccgggggtagggagtgaagtcgggggtcggggcggggccgttccagcccaacctgaccccgttgccaacccgaagtgtgttgccctcctagtgtttggaatgacttagagttccagtatgagtagtagtttacccgttggggccggatccccgcctcaacggagcaggggcaaaatcttccccatgggtaatgcggggcagggcccaaacttcatgccggggatagggaagcatctccacctatggggaccctgtggggccctaaaggtctactattagatgaaggtggcctatacaaataaacccaccaggtccaattaatgaggatatatcaagagaaatccggaccttatcctcaatgtccatggacccgatccatccgttccattacagccacaaccctcgtacctcaacctgtgctaaaggccccaaacatcggcacatcgggcactcgtgttatattgagcgctgccatgcttcttctctctcacacaccttgctgtgggccatggacgacctttgcctcgaaccatgccaccaaccgccggaacagaatgtcgccgggcatcggcctcaattatgcaccaggccagtagcttctttctctccatcaccacatcatttctggtcccgcacctcgtcttcgtccgctggtttccctccgcatggggcctgctgtggccggagccggggctgggtgaggcagccgggggttggggattgaggccattcttgcccaacctgtcccgtcgtaaactctatatgttctagtgagtacatactgaataatgcctttccaatggcaattggcaaagtagtgatgcgtctggcggtgaactgttcgtttaaatttgtctaattcagctttaagaaagtaccactacaatttggaacgggtctacacggccgggctactagcacattccttttaatgaatcatgactacgatttgttacgagtaattaagctataacacgtccaagtcggctttaaactatgtagtgactatatatccaggagtagaattacatgactcatatttaattaatcaagttgcataagagacgataaccacacccagtctacctgataaggcgaagaaaacacgatgacacgagcactgggcggccattggggcaacttgatgtaaagaagtcgcttgtcagctttcgtcgtcgcgtctctgtctagatttcaccaatatataatatttctcataacctattgtcaacaggaaactttaattacatagtatatagtactgactaaatacaaagtaacaacgtttccagcttgttgtcttctgtcggtacagtctgtacagatctaactagaatttgaccttgattgcacttcaagtttcaacttatttgcaagatttgtgagcacattgaaatatgagcgggtgctgatcgattttgaataccggcttagggaattttttttatcggtatcaccatatatcacacctacagttcgaatccaaaatgttgaattgaaggaaagggatcctctgacttaactgctgtgcagttgagtcactgacatgtgggccatagtaaagtgggacccacatgtttgcatgtgcattttaagttagaggatctgcttcttgaattgaaaagccggtcgatcgatggcctgaatttttaattttgtcgtggctaaagtgtagttttttatttgatctgacgactataaaatattaatacatcgtatatatattataaatgataaaatgtagtcatgcgtactagtacgtgcaactaattaatatataataatacacaatagacagtcataaactgtggtaatagcatagtcaacactaagaaataataatataatgttccacaacaaatgataattcatcctaacctatcacaaacactagggttgcgaactgggtgttcgtttattcattcataaatatgagtgtgcacgtatatatgagcaccgctgtatgtattgtatttcataaaagaaacaaaacgaattattgcacaattatttcaaattttaaaattcatatctgaatagtatgttgttaccaaatgggtattaacatgccaacattaaggtttcgattacccatctgtacctttcttttagattatggagaagtaagttttggtctatgcatcaatatgttggaattaatgaatgggtctcaacccattcgaagatttttttctttgaaaaatcataaaagcctacatcataagatggcatacatggcgagtttagtacaccttgtctattctaggagaaggagacctccctataagaaaggatactctcttagacactgaggcatgtgaggttgacagaaaaaggggaacacacgcacgctcttacacgcctggactggcctggcggcgcgtgtgcacaacatacgcatcaaattatctctatataagtcgagccgccgcctccacacaacacatgcgaaatcaaatttagggtttgccccctctatactatgtcgtcgctcgtagtctacaccatcccgctcgctagcgtgcactggcgatcgggagagcaggtctctataaccttcgcctttgacattctgcactgggaaaaggcggtaataagatttttgagaagcgctgtgtttctgtcatttttgcagcgggcatggctagcaaaggcctaaggctagccaaaaaacaatttttttttgtggattatactcatctgtgacgggccataacttaatgcccgattgagatgatggtcatctgtgacgggctgtagctaatgcccaattgagatgacagtcatctgtgacgggctatagtttaggcccgattgagattagtattatctgtgacgtgctctagtttaggcccgattgaggttagtagtcatctgtgacgggctctatttgtggcccgattgagataggtcatctgtgacgggctatagtttgactggtagtctgggtcaaagctatcggtgacaggctttaattagggcccgattgagataggtttatcagtgacggccgtttgcccaattgagattacttttcacatcagtgacttctagcctgtgatggacgccgtgcccgattgagatggggcttactgcccgtttgagatgagggtatccgttccagtgattgcttgatttccttcacttttttttaccaatatatatagttgattggaactatatatatttttgatttcttatctatacaaataatacaattgcagctaactccaatattcggtgtttaatcgaaatgattggatagactgtcatactcggcttctaattagaataaaggttgttgccagttctatacttctattccattatttcctcaaactaacgagaaaattgaaattcccatgctctaaccagcgaaaatgcacaccatcctcctagttagtccaagtaaagttacacgagcattttcagcaaaataacaagaaactaatgaagtcaactccagcttgcgtaacgtagcatgctaataatgcacgcgaaatttcagactccagttgttaattttggttgtttaattaccaaagcgaccgggcatgaagttgacttggaaagtcggaaacaatgtgtcagctcgttggcacacttatctatatccttctcagataagtacggcatattctgtccttttcatgcctctcgtccgttcttttgtcgtacgtaactcacggtagtcatgtgacatttcttcttaaactccgttgcattgccatcaaagcatgactatttctagtgtcagactttgtcaaccgtgggtgtggtgtgtggtctgctcacggagttaatttctcacttctcgcttgtactcctacaacagatggaaccaaggccacacgaagcaatatatgcattttccagggaacttttactatacctccagtggaggtgataatattaatagtgtggtagaaattggtgccggttctttataggtggcggttcttaccatccctccaaccgtttctgtatccattgagtaaaaaccaacacctatgttttaagttctggtttgaaaggatgttcgtacaggactataggtgttgggttcttcatcaaaaccgacacctacaataccatctataaagctgacaccgatgactttagtgtcgaccaattgatgccgacaccaaaagtaacacctacgtgaccttccgaaccggcacctataatacttcatatagtagtgaagtcctggtgcgctctcgtcagccgcccactacgccagattctcacacctgtgacgggcataagtattggtcagtgataagggtcacctttgacgggtcctacgggatcccatcatcggtgagccatccggcggcgacccatcacagttaactaatcacctgtgacgggccaaaaatggaacatgtcaaaggtgaggtaaagtcaaatatttggcctgactttacctcacctttgacgggtttgactttacctcacctttgacgggttccaatttttgtcctgtcaaaggtgactagttacctgtcacatatgaggtatacacctgtgatgtgagtaacatttatgtgcccgtcaaagatgataaaaaaaatctctctcataaccctcccctctcctcccggctcatcgatccatcattctcctctctctctctgtccctctcaaccctttctctctttatcgatctagttgtgtgtgggtcggaggcggaggcggcaccggtgggtctgcgggctggagggggaggcgacaccagcgggtgtgggggttggagacggagatggcactgacgggtgcgcgggccggaggcggaggctgcacgggcaggtacgggggccggatgcggaggcgcgcggcaccggcgggtgctggggccggatgcggaggcggcaccagcgggtgcggaggcggcaccggcgtcggcgccagttggaggcgaaggcagaggaggtgggagattggggtcggtgatgaaggccgcctctttaggtcccaactccgtccgcccctccgcctctagatccggcctaccggaggtcggtggtcaccggatcggaccgcccctgactaatgaaccctgagcttcactcgagacactcaaggcggttattggcccgatatttcggtgagttgtagataactacgatttgggagaaacgttgacgacccgattacaaccgtactagacattgttgtgttgcgccttagagatcgatacacctctccatgggttgttgatcttgccggtgcagatcatccttattcctgcaagcaaatcgaagaaacaagcaagaataagataaaagcaacctgaattacatataccaataataagttggggttctgtaacgagcaaaccagcgatctaaccgatcacgggattacacggcaaagtagcaaagctaaactttaatctaaacaaaacccaagaaatcctgaaggggtaccaagctatttatggagatgggaggaccctaggtcgtcctccacctggttggggcacaccccacatgggacccacttgggctagggtcctagacgaagttataagcccatatgcccattaaaggtgatgcagcactttgtttcctcaattgcggctcaatgagatggaatttcacaatgagtttgatccattggaaagaagactccgagagctttccatcaagtactacggaccgaaaacggatgtcgtatgcagattcagtggccctttgaagtcagcagtgtagcaagtggccgaatcagattccatcacttgggcatcttgatcttgatgtgagcaatggttgtatcaatggtagccttggtcacatcatcctccccttcttcagggaaaaccgtctcggtttttccatatggtgctcttcgcatagtccatttaaaacaacatgtttcttccaatgaaaacaagacactcgagataatatgattagcaataatatgtatctctagcttgtatattttatccacattgatgggaggttctaaatctgaacagatgtgaaaaactctatggaccaaatatattcctctatcatcagattcgccaaatatatgaaaaatagcactagttggatatgtcaaattagacttagcaaataatttctccttcaaattatcgagctcacaaaaatcatcaaactaaacatagcccaaagtatttaaagaagatgtcaattttcgttcctcaacttcagtagcaatgtgaacaacatgcttagaatcagcacataacgaaatattataaatagcatgttcattcactagttgtggcatggatataaatgaaacattatcacacaactcttctttatcacaaggaacagcaagtaattcaagttgtgacaaaggcatctcaacaattggttctactaatggttgctcttctctagcatgaaaagtggacatgttcaattcattaacggcacactcaccttgattaattgcagcaccattaatattacctgtggttctctcttcggatgatgtaggtgcatcagtcttctcttcttccttcgtgagcgatggagatggcatctcgatcatatttctcttctcctcacggtgaatgttctgagctccctacagaatgtcagtaataggaggcacaagcatagcttgtttctcccttgggttctttaacatattgctctcaacactgcaagcaagtatgaacaagtggcctatatgattatatgtcatgttaataagcccagcttgaatatcggaattaagccctctaaaaaaatctagtcattgtgttctcattgctttcttttaaaccactataagagatacaaattttaaagttatgaaagtactcccgcacggttttgtcaccttattttagatgttctaatttctcaaggagagtacgtttataatatgaaaacacaattttttttcctcatcattgttttgcattcatcccttcaagcttatggccaacagtataccaccaaaaagacgtagaaccggtacacttattactagcagccttaaccatttcagcattagagaaatcatactcatcaaattgtttgtctactgctagctcctaattaacataagcggcggaatcatacttacaatcactggcaaattagatcctacccttgcaagatcattatcatgtacctcatatacaatgcgtaaagaagtcgctatatctcgttgatggtgaagaagtcaatgttgagcatgaccatcttgtttctgcttgctcaatcctaccatggttagtagcaaacaagaaacatacaaatgaatatgcacgctcctatcaactactaggtagtggcagctgaaatatcacacactcaagcttttcaccaagctcttacaagttcttaccaaagcaagcggaatggtgacgtacacggacctcaaccaagcacctcaatggagtttggatgtatcgataccttggcaaacacttgctgtacggctgcaatcaaatccgtggagctttgggtaggcttaaatatgtagcaaaggaatagcaaatgctcaaatcagagaatgcaaagttgaataatcgttcaaagtcatgtaccgtgctggtcctaggctagaacgtactagagacgcgaccctagacacaaacgataccacaagatagcacaagaaacaacttaagcacactctaatatatgacaatctcaaggatacaactaatgttctctttttttctttctttctttttcttctttctttttttcttttctttttcttcttttttctttttcttttttttgtgcgactttttgtttctttcagcacctttgtgccttttctcactttttttatttttttagaaaaaaacgactcaaggatcttaaagcaagattacagggactcaaatgtaaatataaaaattacagggactcaaatgcaaaaatgcaaaccctaaaactcaaattatacaaaaatggaatgtggaatttatgcccgttccgttttttcaaattgatctcgaaaccgacaccaaacaaaaattcaccaagctatctagcaaatcacgttacccattgaaactgagacgagatgagagggagggagtacgactctcctagtcacggtggtggtgggtgcggggtggaaccatacgctaggtgggatggttcggcctttagatggaaacggggatggtccggcctttagatggaaaccgaataggtgttaatcaggaaaccgataccaataaaaaaggctttccccttcctccttcctcacgtatggaaaccgaatctaatctacaaaaaatctctcaaccttccttcttggtagcgcacacattcacggcaaaaaaaacacacgcagtatttgcaaacactagatgcaactcaactccaaaactaaccgacagaaacttctgaaaactacaaaaatagaaccgtggcaacgagccgattccgttttcgtaggtcacaacagagacttgggggcagcgacaactgtggtacaaaacgtgaccagaactcaaaactctaaacgaactagacgctaagaccagcaacacgatgtgacaatgcaacacaaaattcaacaaagcaaaaactgaaaacaaacaatgcaatggcacaatatggctaggtaaatgatacaaattttttttgtccagctattttttggttatgggtagaaaaaaaaaactcaccgagcaacgaaagctctgataccacctaatgaaccctgagctccactcgagacactcaagacggttgttggctcgatctttcggtgagttgtagataactatgatttgggagaaacgttgacgacccaactacaactgtactagacgttgttgtgttgcgccttagcgatcgatacacctctccgtgggttgttgaccttaccagtgcatatcaaccttattcctgcaagcaaatcgaagaaacaagcaagtacaagataaaagcaatctgaattgcagataggaattcaatatcataagttggggttccgtaacgagcaaaccggcgatctaaccgatcacgggattacatggcaaagtagtaaagctaaactttaatctaaacaaaacccaagaaaccctcaaggggtaacaagctatttatggagatgggaggtccctaggttgtcctccacctagttggggcgcaccccacatgggctccacttgggccggggtcccagatcaagttacaagcccataggcccattacaggtgacgcaacatcttgtttcttcaattgccgctcactgagatggaatttcgcaagaccgaaaacggatgtcgtacgcagattcggcggccgtttgaagtcatcagtttagcaagtggccgaattagattccagcacttgggcatcttgatcttgatgtgtagcgcccgttccgtcgtggcgcctagcgggaaaactatctcttaaaaaccctagttgcgaaatctgtttctttgcttattgtctagtgtccatgccatctcagatctcaaatctccgatctatcgtcgagttcaatcccgaatccaaatccttcccaaatcaaatccctccgcaaaagtctattttgcctccctcgggttcgatgggctgaatccctctcggcccatcccccctccctccccggctctctctctctctctccccgctctgccgtgagccgcgccgagccctccctcccgctctcgctgccattcccgccgatgccgcccaaatcgccgcgccgcccgcgcgcgcgcgcgccgtggtggccgactggctagtcgccgccgccgtcagcgcctgccaagcctgccccgcgtctgccgcccgtgtcgccgctccactccaaaccggtccaccgtcatcgccgtcgtcatcgacccggccccgccaccgccgcgcgctagcttacaagggacggaggctgagccccgcccccccctctgccgcatcgctccctctgcctcctccttttcgccaaagtggcaaggaggcaagccccctttctctccccctttttcccttttccctcccgccggcgtcatccttcccccccctgtcgccgttttggccgcgaccgccgagcgcgagctccctcccttgaccgcccaaggtcggtttccaaaccgacatcgccgccctataaacccaggcgccctcccttccttttcccctcccaatcttcccctttttcgcccgcaccattgccgtcccctctgtctcgccgatcgccgaccgccgccgtcacgtgtgccaaaggagtcggtgcgcgttaggacgcggaaggggactccggacgcaccctctccttcctcttccccggcccgaggccggagagatcgctcccgtgccgtcgacccatcgtcactgcgccccgtccgcacggtagtgcatctccccgttctccctcctcaatccatctcttccccttagttttcgatagtagcatgtgtagcctccccgtagctagccggcgccgccccgactgctgccgtcgctcaccgtgtgctcgccgccgtcgccgcccgagctcggaagcgcctctcgtcgccggcctccctcgatgcgattcctcctaatccggcgcaaggggtgggttcccgtagctgcgtagacgctctcgccgccgggaatcggcccctcgtgacctcattgccgtttcccccttctcccgccgccggttgccgccgccgcaatccgccgccgtcgagcatcccccggcgaatccgagccattggctcgtctcccctcgtcctgtgcaacatcccggtgtgctcgccttcgcctgtatcgccatggttcgctccccgctcgccgccgtcgtccgccgtccgttccggccggcgtcgtcgtctacctcccgccggcccgcgtggcagccacgtaggcgccacgtcggcgccacctcggccgcgaccgggtcaagtagaccccggtccgccgcttccctccgccccctcgcgcgcgcggtccaccgcgagccgtgaggcagcgcgtgggcccgccgcaccgcgtcctccgcgaaccgcacgcatgcgccgcgcctccctccccaaaccctagcacgccccgcgtgcacctcgctcacggtgagccgagtcgccgacaagcgggttccacccgggaccacgcgggatgcacccggcccaccggctctctctctcccctccccgcccgcgcgcgcgccttgggccgccttcttgggtcggccggcccattaagctcggccgagccgcccctttctctcgggccgcgccctagccgcccgaggaaagtctaatttccctccctccttcttttcttttcttttctttttcaaaaaggatttaaataaatcctttttcctttagacaaaaaatccaataatcttagaaattcaatatcttcccaaccgtaagtctgtttgactccgttcaacttccaaaattcctcaaatctcgagatctatctaatggcacgcttagaggtcaataatagggctttattttcgccgtttgctgagttgtcctgtttcgcgtgtagtttcggagctcgaagacccgcagtgcgaggatttcgaggatcaagctgaagatctcgagcgaggcaagccacctttgaacatcttgagcctatatttgaacttaattatgttgcttgaaaaatattatgcattgataggatcgcacttaatctgcttatcccgtctgcaaggcagattggcggacctacctaatttgttgcatttgacccttccattgtaattgttataccatgttcccttgtacccacctagttgcgcctcggtaatcgtgcactctgcacgggtatcgacggtcgccttcaaacttaaaatctgagaaacatcttgggtaaaacttgggttttacaaaagacttggaaaacccgacacctgggttggtgcttgcgaactaaatgaatttccaaaatcgcggaccggggaacgtaccgggtgtacggtttcccactcttgcacttaaggaccgtttccttggaatttcatccgaacacatgacaagtacgaccacatgggtggaatgggacacccctggctgagtaactagcttatcgggggagccatgatgctaagagacatgtggattcaccggggtggtgtcagggaggacccctgggcttcctggcacagtatggtctgggacctaatctggtgttggtctgggacccctctcgttggcatatggtgaacctatgtcggctttcgaaatgccttgtcatgaaagccttaaggtctctagtcgtggccgttctgcacgggctggatgatccgggttagtaatgtcgtgtgggtaaagtataccccctctgcagagcttattaaaactattcgaacagtcgtgcccacggtcatgggcggatgtgaggtgattcctagcgtagttttgtttgactactgccttgtgaaatttgctgttgtggaatgggtttgatgtttggaaaatctgcggctgatgggattagccaggcccgggtggccgtttgaaagctgttggccgggtgccaatcttgatcaattcaaaagactgatacattgcacatactccgaccggacgagacgcactgtctcatccgtgtcgtttgagaagcactcacttagttatttcagaaaagagttcaaataaaatcaattgcaaaaacaacagcctttctttgaagcctgcattaaacacttatttcccatggcttgctgagtactcccgtactcacccttgctctatataaataatccccccccagttgctgaagaagatgaagcggatcccgctgacgaggagttcttccaggagcaagctggctacgatgagttttagggtttcggcctagttcccaagtcgcgcctgtgatgtttggtccaagtcttggcttccgcttcccttttgtaatgcagttgcgagctcgggatctgtctgcagcccaacatgactgtactcctactctataataaagagacctctgttgctgtgatattttgtcttcctgtgataccagcactgtttcctaggactggtatcgattaacaggttaatttagagcgtcacgggctagttccgctcgggactagttcggggcgtgacaagagatggtatcagagcacaggcttggccctagggcgaaacccgacgtttaggatgaccctaaggatactaagttcaaaactacttgcgaaaagctaaggcttcttttggtttctttattttcaatagtttgttgctaaaatggttagtgatcttttctccctctttcaaaattgtagatggcagtgaacgccagcttcagttcccacggttttggtgagggtcaccacgtcgctcagcttcgtgacctcgcccgcttccttggcttctcgtgtcccgagtacatggggtactccgtggacgtgttccccctcgctgtgagctctctgtgtacctttaccctcgcggaggtatacacggagctggccttcgcccacaccacttcactgtggctaggcccaccctccagatcgcgtaccaggacctctcctggactgcgcttcgtcgcttggcccacgactacagccaccgtctcgggggctctgccttccggcagctcccacgtcttccttctggctacgcagatgccaggtacccttgtccgtacagcgagtcttagccagtgctgactcgcatggttgagctttcggaggctcaggccactcagcacgacctactccttcaggcttaccgctcccttgcccgccgctacgctactctggaggcccgtctggccgaggagggtgtcacctcagttgacactgtctcttgggactcaggccgcctctgccacgccagccacctgtcctcccacagctcccgcggctctgctcgcactcctagtggcccgcgctcccccagctcgcgtgcgccgtactcaccagtgtactccccctacccacacccagttagcccctcctacacccccggacacaccccagttgcttcctcccgccgtggcgcacgctttatccgcactgtgcggaagcgtgttgttggttcttccaccgtgttccgcttcgactacccagctcccccaccgccagcggcccgtgctgctgccggccctcgacaggttccgccggtcccttcgcgtcagccgatcgacgtttcttcgactgatgagccgactacagcaggcagccaggcaggcgaggagtagaggaggcagtcttcagcagccgtccgtgtgttaggcccttttgttccaccgccaactcttttggagtcgtggcgaggtagtgcgtgcgtgtgttgacgtgggtgttgtttggtagtctggttctcctaggtggtgtgcgtacagtcaagctcggcgtagctctgtgacttgtccacacccgttgtatcaggtgtttttatgatttgagaaaaaaatccagtttatgcctagtgcgtgctatctgagttgttatttactttgctccttgcccttctaagtgcttatctgattcttacctcgccctcttctaggagtttagatgcctagccgcccccgccgtgctgctcatgcaccagcccgcttcagttttgaggaaggtagagttgagccagaagcaaatcatgagtcagctaatgagcagtctcaccacagcatccgttcgcaccatactgcttcccgcaatgcagaagttgagcaaccccaccgcagcaatcgctcgcatcacacagcttcccgtaatgcagaagtggaacaatctcaccgctctcaccgcactgccagtcacaattctggagaagaacgcatcccttccccacctcatgtggaaaacaacatgcagcacttaatgacagttcagacacaaatcttgcaaggattagccgcagccatagccggctttcagcataatgcccatggaaatggccaccctcacatgggcaacaatagatccaagctgacagactttctgaggtctcgtccgccagagttctctcagaccgtcgagcccgtcgaggctgacgattggctgaaagatgttgatagaaaactcaacttagtgcagtgtactcctgttgagaagatgctctacgcctctcaccagctaagaggacatgctgcagattggtgggagaattactgcaatgcacaccctgaacccactaacattgcttgggatgagtttgctacggctttccgtggagctcatgtgcctgaaagcaccattgatacgaagaaagaggaatttaacaggcttaagcaaggcaacaacagtgtcaatgagtacctaagtcagttcaacaagttggctcggtacgcccctaaggaagtggacacagacaagaagaaaatcaggaagttcttgaagggaatcgcagttggaatgagactccagttgcttgctcatgacttccccacttttcaacatatgatcaacaaggcacttctacttgaggatgccagaaaagaggctaccgaagaatacaagaaacgcaagtttaaccatcaggggaattcttcccgaggcgcacctcgccctcgctatggtcaacccatgcaatatcaccaatcggtcactcaggctaaccgccagccaggctacgcccctcgtcctcagatgaaccgtccggcacctcagccacagcagcatgccccaagtggcaatactgcgccaaatagtgttacctctttcaagtcaccactaggactatcagcagttcagtgtttccggtgcaaccagatgggtcactatgccagacagtgccctcagaatcctaccaacaccaactcagggcatgctaatggcagcactgccagaactcctactccagcggcagctcagtctcgtcctagctctcaggcaagtggacaaggttctcgtgcttccaacaactttggtcgaggccgggtgaaccacattcaagctgagaccgctcaggatgctccagacgttgtgatgggtatgttctctgtgaactccgtacccgcaatagttttgtttgattcaggagcttcccattctttcatatcacaagcttttgtgaagaaatggttggaaaacccaaaatttacgtgtaccaatgatagtacattcccctgggaggaatataagggcaacccaaatatgcccggaagttaaccttagaattgaggaagttgacttcctagccaaaccgatagtcctagactcgcaaagcttggacatcatcctagggatggattggttggctaagcacaaaggacagatagattatgccgaaaggtccatcaccttgcaaggacctagaggaaagcaagtctgcttcaccactaacacccctaccgcaagtcggtctatcctaacctatttacaagtcacctccttggagtcggtgcccatagtctgtgaatatcccgacgtatttcccgaagaattaacaagtatgccaccagaccgagagattgagttcgccatagaactggcaccaggcaccgcaccaattgcaaaaagaccctaccaaatggcagctaatgagttagcagaagtcaaaagacaaatcgaagaattggagagtaaaggttatgtgcgacctagctcatccccttggggagccccagtgctcctggttaagaaaaaggatggctctgagagaatggtaatcgactatagagccctgaatgaagtaactataaagaacaagtacgcattgccacggattgacgatttgttcgatcaacttaaaggagcaagagttttctctaaaattgacttgagatcaggttaccaccaattgaaaattagatctgaagatatcccgaagaccgctttctcaacgcgttatggtctatatgagttcacagtgatgtccttcggaatcaccaatgctccagcattcttcatgaacttaatgaacaagatcttcatggaatacctggaccagtttgtcgtggtattcatcgatgacatcctgatatactccaagaatgaggaagaacatgctgaacacctgaggctgataatggggaagctcagggatcatcaactattcgctaaattctcgaaatgcgaattctggttggaccgagtagcatttcttggacacgtgatctccttcaacggtgtcgaagtagatcccagcaaggttggagctgtacttgcttggaacccgcccaagaatgtgtcagagatccacagcttccttggcttagctggatattatcgaagatttattgaaggattctctaagctagccagacctatgaccgagctgttaaagaatgaaaagaaatttcaatggtctacagcctgtgaagacagctttcaagaaatgaagaaaaggttgaccaccgccccagttctcaccttgccagatatccgaaaggatttcgagatcttctgtgatgcatcaagacaaggcgtaggatgtgtcctaatgcaagaacgaaaggttgtggcctatgcatccaggcagctcaggcctcatgaagtcaactatcccacccatgatctcgagttggcagccgtggttcatgctcttaagatctggaggcactatttaatcgggaacagatgtgaagtatacaccgatcacaaaagtcttaagtacatcttcacccagaccgagttaaatatgaggcagagaagatggttggaactaatcaaggattacgatcttggaattcattaccatcccggtaaagctaatgtggtcgctgatgcgctaagtcgcaagacctactacaatgtagctcaaatatggccagaccaagatcgcctgtgcggagaattggagaagttaaggctgaccgtggtacagtcaggtgtccctgccagcttgaccgtgcagcctaccctagagtcgcaaatccgggaagctcagaaagatgatgaagggataaaagaattaataaaaagaatacaggagaagaaggacaccgatttctcaaatagacgatcaaggcacagtttggtgcggtccacacatctgtgtaccggccaagaaggagttaagagatcccatcctaaaggaagctcatgagtccgcctactccattcatccaggaagtacgaagatgtaccaggatatcaaggcatatttctggtgggctggaatgaagcgagatgtcgcagaatacgtggcgttgtgtaacatttgccaaagagtcaaggcagagaatcagaggccagcgggtctgctgcaacccctaccgattcccgagtggaaatgggaagagatcggaatggatttcatcaccggtttgccaagaacccctagcgggtacgactccatctgggtaatcgtggaccgactcacgaaatcagctcatttcgtgccagtgaaaaccacctttgatggaaagaaactagcagaactctacatgacccatgtcgtgtgtagatttggctgtcccaagaagattgtgtcagaccgaggcactcagttcacctcaaggttctggaagcagttgcatgaagctctcggaaccgatctaaattttagtacagcttaccatccgcagaccgatggtcaaacagaaagggtaaaccaaatcctagaagacatgctacgtgcgtgtgccctggatttcgaaggcacttgggcaagctggctacgatgagttttagggtttcggcctagttcccaagtcgcgcctgtgatgtttggtccaagtcttggcttccgcttcccttttgtaatgcagttgtgagctcgggatttgtccgcagcccaacatgactgtactcctactctataataaagagacctctgttgctgtgatattctgtcttcctgtgataccaatactgtttcctaggactggtatcgattaacaggttaattggaacgtcacgggctagttccgctcgggactagttcggggcgtgacatgatttgagcaatggttgtatcaatggtagccttggtcacatcactgacctcgcggcagtcggatcttgtcaccggccttggtctagtcgccgcatccgcccacgcccccgcctccgtgtccaactccgtcggtccaagcaagctccagaatggctctttgaggtcagaggtcaccacctccttcgccgatccatcgctttacccccttccccttcagatccatcgctgccacctctcagtgccgccagatctggcctatttgaggtcagaagctgcggtggggactacaaagtcgttagcaattttgatgaaggtctgatgatccattcggcagtgacatcgttaacaattttgtgaagtccaacgataggggaattgatccattctgtttgtgaatgtgattctgttttgtgcgattgtgaatgtgaatgtcattttgctctttggctagatgaatgtgattgtgatgttttttgtgattctgttttgtgcctaaatgattgtgaatgtgaatgatgagtatttttgtgatttatgaatgtctaatgaaggtctgcgactagctaggctcacatcattatatttcttttgccccatttttcaggtctgtgacgggtttcaattaggacccgttacagataaagatcgccactaacgagtcaaaatatttacccgtcacagatgaatgttacctgtgacggatttaagttgcagaccgtcaaaggtaactcttacctttgacgggtctttactcgtcagagttgactccgagtcgtcagtgaccactaatctctgaccagggccatatccgtcaaaggtgagggtttgcgcccatcacagataatgtgatccagtgtaatggccagccctccctgcacgagccattgctcatggagtcgtcgatgcctctgcatttgatgtggaggcacaccgtcggcttgatcacccgtggacctaccggcccgtgaatacattctacttatattaatttaagatgtgcaaccatactagtataattagtgcggcactttgattgacagaggtaatctgcattagtaatagttttggcactgttttctacgtagtaactaatcgaggaacaccggtagaggaactgcagggaccgacgatagagcatagcatccctcattgttagcactgaaaatggactaggtccggccaatcttcattgacggctagccgctctcttccgtcgtcattgttttgtgcttaatttctcccctaaatctaaggttgccggatctgacctcgatggccatggtgacagtaggcttgggtgggtcgggtatatcgcttattaacggcaacctatggccaaaaggatagaggtgtccttcattttctattttctttccatgaaccactatttgccttaaataaagtactatagatatcaatttatttcaggcgctcatactcttggtccccgcccgcgtcgctcaagggttgggcgacacgggcgtcgcctccctccccagccgacccatcatctcctcccacctctacctcattgccgcccaagcaagccaccagaaaaccgtgcctttcttctcctccctgaaagtcttgagactagagcccgtggcccgatccacgatggggcagccgccgcgacatagggtggaaagccggtggcgtagttttagagagggcaccggtgaccagcggcacgcgcgtaggagcctgagggtggcctccatgcaggcggagaggaggtgtgactagatctggcgtctcctgccagatctggtcggagaactggcgacaatgaccacgatcgacgacatgtgaggccacgggcggtggcacatgagtaatgcacgtccatggccgacggagcacgtccaacgcggcgtgaggccgtggccggcagtgtgaggaggaagtcaacaatggtctacgtgagaaggaggttggtggtggcctcatgaggaggaggccggcgagggtcgagcatggacgccctagcttgcgtgagaaggaccaaagtggcagcgtgggtcgcctgcggtggtggttggcctctagtagtgacctcgacagcttatgacagcaaacatggaagtagttaggcagtagagaggtcttcttctctgttgccggctaagcatcctcttctccatagcgctcctcccctttagtcgtggggagctccggtaaaaggggaggcactggcttttgcaacaagcggtggcggtggcactagttgatccgagcaaccctgcgagccagcttgagctgcggggtggtgacctcggcttgcgcgctaaaggaatgtcgtggtggtccggtgacggtcattgtgcaggatatttgtgtgggcttttgaacaggaattgctagtgaaaaccttgataagccttggcccgacttgacgacgacaccgacgccattaggagccgttctcctccttgtaggtgtcgttatggcactgacccctttttccccaacaccaactgcgtgcaacagtggccattggtggactcctgcaatggtgcagaagctctataggcttagggtgtttcttgctttgcggtgagtgaccatcatttttctttggttgttgttgggtagagttggagctgctttgttgttggggtgtaatgaagcttggcaacgatttttggctagctgtgtgcaggaagtggctccttggtagcttgggccaatgtcctttgtgggttgtcaaacttgtttgtttgttttggcgttagggcatcttcgcagcgaagtcggaactattatgtcgcttgtggaaagcttggtaacgataacacatgtgagcggctgtgtcactactatggcaagcttggtgctaatgtctcacgatgggctccgtcgtggtagcttaggttagattagttggtgtgttgttgtagttgtgtttttcgcttagtttccctaattaactgagaaatgtaagatatggtccctttttaaaaaaaaattgggcaccatcttttttatataactagcaaatatgagcatgcgttgcaccgggtgaatatcaaacaaatatggatggttaagattgcttgtgtacttataacacatgtgcacaaaaatattgaatttggaagcgtacagatcagaaaaatatgcaattaattaaaatacaaatccattgaaatatctggtatttttaagtaggtatgtgtataattaaataaatttaaaagtaaagcaaatgtgagaaataaaataacatggttaaatttaatgttattaaattctccatgattagttacgctctttagaattttattggaattttcagagcttaattgctaattttaataatacaaacatcatttaacaattatttaattggaaaaagaaacaaaatgcttcattttaggtttgattcgaaataaacacattcaacttcttctctttttcttctgcctgatggacctaaaataggctattggtgcatctttctcacccggcccgagatgggtgttgaaggctagacttcttttcggcccttgccggtcggcccacggccttttgcacatgtgcgggcgcacttcccctccccaggccgcaacctgggcttgggccggaaaagtggccttgctctcgatccctcttgggccgatttcggctcgaccgacgccggccgtccgatctctagggtttcgatcaaacagccgggcgtcgagatcggggaaacaaaaccccctccttctcctcagccgccaaaaaccctagcccatttccttctctcccttctctctcttcgccgccctcccctccgcgcccccgatgctcctgtgcccaagtggaggcggcggcgcctctccccccgagcccaagcggcggcggtggcaccctccccccgagtgacggcagcggcggcgccctcccccaagcagcggcggcgggggcggcgcctctctcgccgagcccaagcggcggcggtggtgccctcccccacaagcggtgacggcggctcccccaccactggcggcgcggccacgtcctcccccaccaccggtagcgcggcggcgtcctcccccaccaccggcggcggccggggcagcggcgcctgtggaggcgtcggcggcccgccggcgtcctagcggcggcggcacccctcccctccgccggatccagcggaaggggagctgcggcgcctggtgtccctgtgatggcggcggttgctcgacggcaacctcccctttgatctttttttttggatatatttgtgtgtatagtgcttcctccgattttattttatttgtgtgattgattgaattctgattgggtattttttttaggtgggggtgatggaattcttactgggatttggggggaggcaagggtgacgaaaaaatcaccgcacctatcaggcaacgaatggaaaaatacgaatatttatattagttatagaaatgtcggcaacaacctaaccatcgaaaagaaataaagtactataaacctccctaggcttgtaaagacctaaaaactactaggccacttaggctgagttcggcacttcatgttcacaaacccacctctttcgtttttcgtgcgtacacttttcaaattactaaacggtgcgttttttaaaaaaaaattatatacgaaagttgctttaaaaagtcatattgattcatttttgaaataaattagctaatattaaattaattacgtgctaatagaccattccattttagtgcaggagggtttagttccaatcctgcactacctaacacagccttaattggtttcttccatcctttgtgagagcaagtttaatagtatagcccactgctatctccaaatcatctataaacaacgtaatagtcaattcatacaatagttgcttgctatattattaatatctggtcccacctgtctatacacattacgtcttgaagttcgtgctgcagcgggctacagatcatacacattacatcttggagtccgtactgcaactggctacagatctatagcccgctgcttttctctctttttaaaatggtaaaattggttatataatatcgaaagtatatttatagttggtttgtacatgctttgagcagctcgaactcgatatggatcattgagaccagtcgtcatgttgggacattgtaaatgccctcgcactatactggagaatctagaacggacggtagggccttcctcgcactgacgcacgaaccgacaaaggtgtggttttattctggttatcaggtgttaccaccacgtcaagatgactggacggatgagatggccccgccaccaccgcctgcggcccaagtcgtccgtccgttccgcccgcgttttctcaagtttccccccctcctttccacatttatctcacccagaccagacgtgccgtgcttctcgtctcgcattcaatgcccctaaccccactccgctgcctattgtcaacgcccacgcatcacttatacacgcgcaccatccatctctttcccattgtccccgtccgtatactagaggtacttgttcttttccttcttcgcgaagcagggatgaagctggtgtggtgcccggagatggcgtccaaggcgtacatcgacggcgtcagggcgctggccggccacgacctggccggcgccgcggcggacgtggcggagctcgtgtcggccatggccggcggctggaacgcgcggctcatcgtcgaggcgccggactccgcggctccggcggcagccgccacgagcctcgcgctggccgcagccgcgcggcgcacgggcgggcgctacgccctcgtgctgccggaccgggatgctgcggcggcctcggcggcggaaacggccgaagtcgttgtcggggaggcggacgaggcgatggcggggctacacggcgtggacctcctggtggtcgacgcgcggaggagggacgcggcggcggtgctcagggcagccaggcccggggccagaggtatggtggtggtgcgccacggcgacgggaggcagcgcggcgccaaggacctggcggcgtccatggcggcggggacgcgggtcgtgcgctccgtctacctgccgatcggcaagggcgtcgaggtcctgcacgtcggcgtcggcaaggggcccagcctgcagaaccaccgtgaccgccggagcaccagccggtggatccgccacgtcgaccacgacaccggcgaggagcacgtcttccggcggcagtgatcagtcgtcgtctgttattccgtccaggtgaattaaatcggatgtaccacggggagggtagttaattaggtgtagcgtgtgttgtccagattcgttgaatctgcccgttaataccatgatgatgtataatcatcggatgggtggaaagtgtgacgaatcacgaacaatgtaaatacctcaaacttgtagctcctcatatctcttccttctacctactgtgaaagctttcttttgagttgatctgctagttcattctttaatttcctttttctttttttttttgctgtgcagagtgcctttgataattaactcagaaaaaaatatgttcaatagatattcattatctataggaaaaatatgtagtgaaaactgaaaaccacatatatagcgaaaacatgtaaacaaccgttggatataaaaatagaccattgctcttgttacctagagtaacatttttttagttaattgctcttaaagccacgtattattaccaaagtttcactttgttctaggctattgatgtttttacttttgatcgggatttcttaccttctattacacattggatcattattgtattccttgcctttaatatactttcctgccactcactccttgatttccttagctcaccagcaactaaacgcatacatcaatactctatcctgatcatctagtaccttgattttctttttggctcttttttcccaccaaaatcatgtgagccgagaaaaatcagttgattgtgagctcacaacaaaagttgctgcagcgagcagccctgtggcttgattttgtgatttgagatcaggaacggatccgagtgaaggaatcgtagtcatgtgattatttgggttaatccatgccaacatctcaatggaaaaaatacaagcaccttgattttctttttagctcatttgttataaaatcggcttgaaatcatcatcagaaaccaaacacggaaaaaacgatataagagatccaaacacgatgacgataccgaggcataatatttattaacgaagttcagccgaaacctacatctctaggacactgattatgggtgctcatccccgatccaacatattacaatgtatcaaagttacaatgaccctcggccggatgccgccggcagtcactacctctcacctatgctaagtcgtcatatgtgattacaatatgtacatccctctatttaagagagggcctaggatagagtccgactcttactctattcttataccatataactccaagtcttaaattgtagctaactacgtatacatattcgacacacaaactctatcaaactccaccttggtgaatatgccacgccaatctgaattcattatttacacgaacttctgtgcattcagaattgagtttattccttttttttcccataaacaagagactccgtaatccctgtaacatcttcctcttgactctacctgcaacagtactccaccttctctcttatgataataattgtcttaccaagcgaaattggatccttcctagctgtcaatccatagattctctaaagaccatgttcatctaaattttatgtcttaaatttgccttgatctaaccaaataaccgatgtaatcaccacatagataaaattcaactcaccatatatgaagagaacactttcttccttatcgtcatatggactgagctaacaaatccaacattcacacttctcgtatcccactactacaaaaatgattttcttggacgaacccatcgttagattccaaacggtcaataactgaccgcgtatggaaaaatcgtcctcccattcttgcttgcggatccttaagaggtccgcacgcaaaaataagactatttttacgtgcgaacccttaataggcccgcatgtgaaaatcctctccctagattttgaaaaaaaaacttctctaaaatgatccaattgttttaaaaattgcctccacaacctactaatcagttggacaaaaaggattgttccatgccatgtaagcaatacaaaaatatattcataaacattgaatcattccatacattcatcgcatcattcattcctcgtgatatcatagcatacattcatgccattttttaaaaaaattattgctatacatgccatcaagcaacctgcttatctttaaattagtaaccttcgtgcttgctgtccagaatttttaaacttttgtaaatgtgggttcaactaagattgatcattggccatttgatcattggccatatatagatcccaaatatatataccataatgtatcttgttagaaccaacttctctagttccactttttggtcatctaccaaagccttcgtaaaccacaactgactaaaacctgccacccatctactaaatagaagtcaagtctataatacaacttaagaaagttactaccactcgtcaatcctcaagatatagtcatgacttaagctaacctcacccacaggagattaggtagaaccttttgttagagatataatgtggtatgtttgaaagaggcttaggaaaaataattaaatcagatactattgtgttatcagaaagcatcatgcaagtaaaacttttagtaggtctttcgatcatcagtcaaggttaggattataatccattcataactttaacaaaaattaaacggagttcgacagtaagaaccacactaagaagagtaggattcttaggaagccaacacattgatcaacgtaaccactacaaccctacccaaatctcggggacgagatttatttaaggaggataggttgtaacatacccgaatttcaggatgaagaaattttcgtcaaaattagttgaaaggaaagttcttcaattttgtgaaccaaaaatttccattttaaaacctaggggaagttgacctaactcatgtaactaaataaaatttgagagcaaattaaaactttttcggaccattcgacgcgtacgtcgtgcacgcgcgccgcctgcccggcccggcccggcccggcgagcgagcgcgcgcgtgtgtttcccctcttctctccaccacacatgcttcaagcgactaggagggcatcctcccttttaaggaggtccccctctcctagaataagcaaggtggtactaaactccacatgcatgccatcccatgaggtgggcttttgtgattttccaaagaattaatcttcgagtgggctaaggcccattcattaattccaacaatcccccaccaaatctcaaaatcccactgagatttgccttttccaatgtactgtttatataccagcggttcgatggagaccaattaaggttgaacatccacctagaactccaagctacacttactcacaacttgaacaatggactacgccttgaattgcaagtcttgtgcaagcaagtttcactcaaagtcttatctagtactagaccgtctgtagactacccctcgggtggagcgtataagtcatactcctaggtctttagtaagcttcctagaagattcacccaaaatcttcatagactgcgaccaacagtcaagctcacaaaggtgagttctttcaagaatgctctgcaggacaacatctttgctaattaaagccaacagaactcattaaggcatagccaacctgccttgcagctcatgagagtatatgcatctttacttggagagggtatatatattggtactctcctctagtttattaatggtttgttcttcccaggatctaattcacgggatctccgatcacatagactgggttaccaccatagtataactcacatgggtctcaaacccatctccttcgatgcattgtctatcacatttcgtgatagtcccttcgtgaagggatctgccaggtttctcgctgtttggatgtaatccaacgttataagtccggagtttcttaatttcctgacagacttcaatcgtcttttcacatgtctagaagatttcatattatccttagaactattcactttgacaattatcgtttgattgtcacagttcataaggatagccggcaccggtttttcaacaacaggcagatccattaatagatcacgcagccattctgcctcaacagtagcagtatccagtgccgttagctctgcttccatggttgacctcgtcaaaattgtctgtttgcaagacctccatgaaacagcaccaccacccagtgtgaaaacatatccactagtggctttgatctcatccacatcagagatccagttagaatcactataaccctccagtaccgcaggatacccagtatagtgaagccccaattccacagtacctttcagatagcgcattactcgctcaagcgcacgccagtgatcatctcccggattagaggtaaatcggctcaacttgctcacagcaaaggatatatcaggcctagttgcactagccaggtacatcaacgagccaatgatttgggagtattccagttgattcctagcaattctcttgttcttgcgaagcaacaatctaggatcataaggtgttggagaaggcttactatcaatgtagccaaagcgattcaagatcttctccatataatgggactgcaagagtgtaatcccattctcacctctaattagcttaatgtttaagataacatcagctactcccaaatctttcatatcaaaattttgagacaagaatgatttaacctcatttatcacctcaaggtttgtcccaaatatcagtatgtcgtcaacatacaagcacaaaataactccctcacccccaccatggcgatagtacacacatttatctgcctcattgactccaaagcctgcagatgtcaatgttttgtcaaatttctcatgccattgcttaggagcttgtttcagaccatacaaagacttcaacaatttgcacactttgccttcttgaccttcaactacaaacccatcaggttgatccatatagatctcctcatccagctctccattaagaaaagctgtcttaacgtccatttgatgaacgagaagaccatgtgaggctgctagggaaagtagcacacgaattgtggtcaatctagcaacaggtgagtaagtgtcaaagaaatcttcgccttctttctgagtatagcccttagcaacaagccgagccttgtacttttcaatagtaccgtcaggcctaagcttcttcttgaacacccacttgcaccccacaggtttacacccatagggtcgctctgtcacctcccaagtcccgttagcgataatggaatccatttcactacggacagcctccttccagtagtctgcatcaggagatgcatatgcttctgaaattgacttaggagtgtcatccacgaggtacacagtgaaatcatcaccaaaagacttagccgtcctttgtctcttactccttcgaggagcttcactgacatcctcctcagagacaagttcatgtgtatattcagtttgttctggtggtgtgattgaactgggaattatttcagagggttggttcgaaccactatgtgtatccttcattgggaaaaagctctcaaagaaggtagcatcacgagactccataattgtaccaacatgcatgtccggtacctcggatttaactattaaaaatctataggcaatgctatgatgagcatatcccagaaaaacacagtccacagtcttaggtccaagtttgcgcttcttcgttattggtacattgactttcaccaagcacccccatgtgcgcaaataagaaagtgatggttttctaccaatccatatctcatatggtgttttgtccttatttctgttaggaactctgtttaacacatgatttgaggtcaacaatgcctccccccaccatgccttaggcagtcccgcagtgtccaacatggcattcaccaagtcagtcagtgtgcggttcttcctttcagcaatcccattagactcgggagaatagggaggcgtcctctcatgtatgatgccatgttcctcacagaataagtcaaactcgttcgagaaaaactctccaccacgatcagacctaagcctttttatctttctgtcaagttgattttcaacttctgccttataaattttaaaatagtctagagcctcgtctttcgttttcaacaagtacacatagcaaaatctagtagcatcatcaatcaatgtcatgaaatatcgttttccacccttcgtcaacaccccattcatttcacaaagatctgaatgtaggagttctagtggtgccaagtttctctcctcggcagccttgtgaggcttgcgaggttgcttcgattgcacacaactatggcacttagaacctttgacaatggaaaacttaggaattaaacacatgctggaaagccgagacatcaagccaaaattaatatgacataaacgtgaatgccaaacattagcctcatcatccacactgccacaagtatggttcacagacttattgcagaaatcagaaagggaaaagcggaacaggcctccgcactcataacctttaccaataaaatatccatgtttagacacgactactttattagactcaaaaaccaacttaaatccgtctctagtcagacgggagccactaataagattcctgtcgatagaagggacatgctgcacgttcttcagctgtacgatctttcccgaagtaaacttcagatctaccgtgccaacaccatgaacagaagcatgtgacccattccccattaggacggtggaaccccgtgcgacctgataagaagaaaacaatgagatgtcagcacaaacatgtacattggccccagtatcaacccaccaattagtagattgattaactgaaaaaacagtaggtaaattaccatacccgcttccatctccagtgttgccaatggtcacattagcagacttagaagtctgctctgcaggtgccttcatccccttgcgctgtggacacttcctagctagatgaccaacttggccacacacaaagcaagtcctctcatcctgattaggattgttgttgttcttcttctgcttcttgaagttggtggtctgctgagctttgtatttccccttgctcttgttctgggccttgtgcacaacattggcactggactgcccaccatcgcccttagacgcggcatctttttcccgagctttctcctcaacatcaagagacgcaatcaacccctcaacggagtattcctgtctcttgtgtttgagtgcagtaccgaaactcctccaagatggaggtagttttgcaataatgcacccggccacaaatttgtcgggtaagacacacttaaggagttcgagttccttagccatggtttgtatctcatgagcctgttcgactacagaatggttgtcagccattttgtagtcatgaaactgctccatgatatacagatcattgctagcatcagtagcaccgaatttagtattcagtgcatcccacaactccttagcgtcgatcatatgcatatacacctcgaccagacgatcgccaagaacgctaagaatgcatcccacaaagagagtagtggcttcctcgaattgcttctgctgttcagcagtaagaactccttcaggtttgccagtactcacccagaagcatttcatagctgtcagccacagagtgaccctgatctgccatctcttaaaatgcacaccggtgaatttatccggcctcagtgcatcggcaaaaccagccatagtaaaatcacagtgcctataataagttttttggattgttgagattatagatatataatgatttaatctattccataaataaatcatgacattacagatgaaaactagcatgaacgcatcattagatctacacatgtaaactacacagtataacatgaacagatcaaatatgcgcaacatattgaacacgtaccgaggtgacggaaagaccggctgcttggtcgaaacttttcgcaagtgtctacgaaggcacgaaacacgcgagcgaagaggaaggcgagccgtcgcgaacgaacagggagcagtcgcgcgaagcgcttcccaaaaaccttattgccgccttctcccggtgcagaacgtcgaaggcagaggttccggagacctgctctcccgatcgccggtgcacgccggcgagcgggatagagtagtctacgagcgacggcgcagtacagagtaggaagcaaacccaagattgatttttttgtatgtcgcttgatcagggcgcccgcacgatctctactgcgcgtaaccgaaccggataagtcgcgcgtaacttatccggactccacgccgtttgcacgcaccggatctttcggaacgtttccaaaacaaaaacgaatccgaatttgcaacaaaacaaaactgcaaaaggaggctgcatctgcgcaagggtgtggagccaatttttcggaccattcgacgcgtacgtcgtgcacgcgcgccgccggcctggcccggcgaggcgagcgagcgcgcgtgtgttttccctcttctctccaccacacatgcttcaagcgactaggagggcatcctcccttttaaggaggtccccctctcctagaataagcaaggtggtactaaactccacatgcatgccatcccatgaggtgggcttttgtgattttccaaagaattaatcttcgagtggctaaggcccattcattaattccaacattttatagccccattacaggttcttactactagggtttagattatacaggggaatttacatgattacccttatgaaagggacatttacaagggtacatgatgatataggggctcatgggcccttgatgggccatctggcgatcgccggccctattgcccctaggcttgatgggccggaaaggcttcttcggccctcgcgggggcgaacttgccaaggcgaagtcgtcttccttcggcagatagtcttcgccttgcacccttcgcctgagacgcctctggcctggcaaggcactcgcacgactcttcgcctcacgccattcttgctccatagtcttcgccatgggtttcggcagatttggtcgaagggcctcatgccatccgccaacaagcccctcacgggcaagggtgagattggagcttcggccgagaccgtgcaaaccatgtggtatggtatgcggcgccccctttcgaccgatgctcctgccgaaacctacattattcttgcgaatgaagtttgttatttgtgcggctggtattattttgccgtgcttcttctcctgcgtttggttgcatattcatatatatattatacacatttttttatatattttcttttctcgggccgaaaggaacagtattgggctttcccttcgtgggctttttactgtgccgctcggacggtgggaagttaccgttttgcctacccttgcgacacgtggcgctttattactggtgggtaggcgaacggtcgcccgggtgagctatatattcctaccgaccttttcttttcaccaccacacttgccattttaccgcgtgcgctctcttcctccgtttctttcttccacagcatctctcgacccctcaagcgtttcgcccattctctttcttcgccaccgcaaatgcaccgttcgccatggaccctcgcaagccaaaccctgcttcggcgaaagggccggatcccggccgagtcgatgacgacaacatcgcctttctgggggtctctcttgtggacgacgtcgagctggcgaagctggtccgctctggggtgttggtcgaggggcaggctttcgccccagggaaatccgtggtgccgaaacctatcgacaatcggacggtggtattcaccgtcttttttgaggcagggctatggttcacctgcaacatgttgttgccggagatccttcgcctcttccaggtggaacttccacagctgagcccgtcggcgcttgttcgggtcgctatctttgactgggcgtgccggacttccgggtttgagcctaacgccgagctcttcagcgccatatttttcgccaccgtgaacttgaagacggtgattatcccggctggaacgaagaagacagtgttcgggagcgtgaactttaatgttcgtcccgagcggtccgatctctggccggtgaacgctgccatgtcgaagtgggaccgccattggatggctaggtggttctatcacaccatccccttcgaggctggcactgacttggcgaaagccctccgttgccggcgtggacggcgctatggaggcgcggttcgttctgctgcgaaaggtttgctcccgccttagctgccatgacttggtggaggaattctgtatgcttcgcatctttcccctctcccagtcatggcaagtcacagttgatcaaggcgaagaggttgacggtttgccgaacctggttcttcctgagggtacggacagtaagattgttctcttgctatacactgctgtgctttattatcttgccttgtctgactgttaacatagctacacactttacttttgcagcgttgaccctcgaccaggctgaaaatgaggcccgcaggatgatcggcgacgtgccggtcgtcgagtatagccagttgctaacacgacaagcggctgggcgggcgaaccgggtttacaacggcgaattgcctcctcgggcaaacccccacaaagctgacgacgatgcaggggcttcgcgaaagcgaatgcgcggacaagtgaagcttgcccctaggaagcgaagggttcctgcttcgccggactccgacgccgacgacgaggatgatgccgaagaacgcgacggcgaggaggaaggagaggagaaagaggaggccatggccgataaggccgcgaacgaggcgatcgaagaccgcgtcgacacccccgactacactcctaccccaagtcccggtcacaacgagaccggggtggagtcgaacagctccccccttcgacggaaggatttggaaggggcgaaggccctagttgcattctcctcgggcaaggcggcgaagggaggtccggtgcagaagatctctaaaaagaaaggactcgtcgacatcgcccacgttttcagcgacgacgaatcttctaacgggactccaacttcgcctgctggccgcagtttagacctttcgactgctcccctcactccactcggcgttgctggggcaggcggtaacgtcgccgccggggcttcagcctccgccgaacgaattgtgtcggctgcggcgagggttttcgggagccctctgcgtgagccagctatttcgccgctagtcaaggcgaaggggaagtgtgcggccgccgaagcatctgcctctgagtattcccttgcggcgccccacttcgcccctggtgatttcgagactcgggcggaccttattccctttgtggagggagtgagcaaccttgtcttgcccgccggcaccccgagcttgttcaccgaacttaatgagttcgacgaggggtgttccgccattaaaagcctggcagttcgggtatgccttttcttccttcttcgttttcctcttcgtccccccctttttttttacgtctgacaattaaccttttgttcttttggcccgctcctatctttcatctagattcttgcggcactgttcgacggagcgaaccgtacgggcccgttttgacggttttaagagccatcttcgggccaaggacgacgaaataagccgcaagaacttggaggtggaggccctggccaacaccctcaaggaggcgaaaactgaagtcaaacgccttcagtctgagctagataaggggaaagaggccagggccgaggttgatcgcctcaaggccgaactggagaaggagaaggcccattcggcggtgctgattgactactacaaccttactgagccgaagatggaggctcttcgcctgaaggctagtagggccgaagcgagcgccgcggaggagtcgcagcggttttcacaggagatggcgaagaccaccgaatccgcgagaacggcttgccaaacgctccgcctcacccttaccgacatgggcgcgaaagtgcggggggtccctgccgaggatgcatcagccttcgacttctccgagtggacccagcaggctgacggatcggtttcggactgcgccaccgcgtacggcgattgctgcgcgcgtgtatcggcggccttcaccttaggccttttgcaacagttcggctgcgagcacgtcgccgagttccctacctatgcgaagggggactaggagattagtgcgcagaacatctcgcctgctcttcgcgcgtggcgaaaacagttttggcagaaagatggctggtccgctgccaaagtgcgccttctggagcaactagcgaaggcggaggcggcagatcggggcgaaggagagggcgcggcaggcgaagaggttggaggcgatgcccaggatcacccagaggtgtgaggccctccgccctttccttagatttttgtagttttcctccctcttttgtgtttgcctggagaggcgaatgatgtacattcgtcaggctgtcgccaaaccttaaaaaaggctttttttgtacatttggaatatatgacacaatcttaattactttttgatgatcgaagtctttagcatatttgttatttcgctcatctcgtattatgccatacctcccccttcttacgtctattcttactatgtaagctgtgttttgctttttctgcactgtccatcagggggttcaccgaaagtcgtgcatccggcccccttccgggagctggcgaagtcaaaatgagaaatttgtggcagtgaagggtctgccgaaggtgcgatgtccatttcggcctgtttatcgtgaaatggagataaacggtcgcaactataaggttttcaaggttgccgactggctgcgggtgcaccccgggcgaaccttagaagattacgatcttgttcattctagacgtttgcaggatatggctcgcttttggcgaaaccatcagaagactgaatgtcaggaaacgatctttcagcgtcgttatagtttagtatgtgcttcaccccctactcctcttaaggttgtgtacgatattagtagtgatgacgaacctagttcgcctgatcattccttagggagggatagtgattatggggacgaacatgtaatttacttgtaaggtgaattgtatcgtgttgtgaaacttctattcttcgattatttttttcaaagttaataaagacgtgttttatttccttttcgctattgtttgcatcgtcacattttgtgcttttgttaggtcagaacatgccggcccctttgcatatatgagcgaaataggtgtactgacttttcagcttttcgtcgttcgttttcgatctgtagcgttctgtgccgaaagaaacgcttttgcttttatgctgatcggacgtaacgtcgttcggccatttaatttccgagacaagctgttgcggtttcaacgttcggcgagcgatgcttcggccgattcgtttcgcccccctggcctttttcgctgatcgagcatttgccttgggatttttccacaaattatcaatcacacgaaaaaaataaaaagaaggcggaggacacagagattttatactggttcgggcctccatggtggataatagccctacatccagttttttcttcttttttctctctttcttcttttttttttcttgccgaaaggctttcatagtgctgaagggcttacatagtgccgaagggcttacatgacagtatgtacatttttacaagttggtgatttgggtgccaccctttctagacatagaagcgcttgagagaggcggcattccaggaatggtcgaactcctcgccttcgagtgtcgctaggcgaaaagatcccgtcctggacttgtgtttgatgaggtattgtccttcccactttgattcaagcttgccaaccgctactggttcaccttcttccttaggacgagatgaccaggcatcagctccgtgggtcgaacttttttgttgtaagttgccgaagtgcttgtggcgtacttgtgtatgtgctcgagcgcttcgactcttactccttccaagagttcgagcgatacttcgcgtccctcttcacccccagagaacatcacccttggtgagttagcccctagctttgctggggtcattgcctcatcgccataaagaagcataaacgggctaaacttggttggtcttgtgggggtcgtccgaagggcccagagaaccgatagcaattcctctggccatttgcctttcgctgccccctcgagtcttttctttagtgcttctaggatcttgccatttgtacgttcagccgccccatttgactgcgggtgtgcgaccaacgcgaacctgatttccaggttaagcccttcgcacatttctctgaacttatcagagtcaaactgcttgccgttgtcagtaatgaactcttttggcacttcgaaacggcaaacaatgtttttccatacaaacttctgtactgctgccgaagttattgccccaaggggttcggcttcaatccatcgagagaaatattccacagctacaattgcgaatttatacccgtttcgcgccaccaggaacggcccaatgatgtccagtccccatctggcgaagggccatattggcgcaatgggctgcagatcatactggggcgcggcttggcttcggccatgacgctggcaacttttgcacttattgatttgctcaacacagactttcaacacaatgggccaataaactccttgtctaaatactttggaggccactgttcttgtagcctggtgcgcgccacatagcccctggtgtatctcctttgccatttcttcgccttcggcaaaagagatgcaacgaagtaagggttgaagtaccccggagcggtaaagctaacccgagaccatcttatacttcatggctctgagttgcaaacgcttcgcttctgcttcgtctaccggaagccagccagtttcaaggtgttttacaaatggggttcgccagtcatatgggtcttcgcccagtttctcctggttgattgccatgacttccgagctgtccgtgggcacacttggagcatgtaagacttcgaaaaagatgccaggcgaatgtgggccaccacaagcagcggatttcgccaaggcgtctacttccttgttctggtctctaggcaagtgttcgaccgttatgccggtgaagcatttttccatggaccgaacagcctccagatacctcttcattccctcttcttttgcctcgaaggatttgtcaacatggcctgctaccaacttggagtcagttcgaattagtaggcgccggactcccagtgctttcgcctttcttaggcccaggagaacggcttcttattctgctgcattgttggttgtgtcgatctgcagtcttgctgcgtaccgaatcggcacaccatttggcgaaaataggactgccgcaatgcctgctcccttgtgcgaccacgagccgtcagagcacatcacccagaattgttcggcgggctcggggtcgggggcaagtactggtgtccattcagctacgaagtcggctagcacttgagacttgatagcagagcatgcaacaaaatgtaagtcgaacggggatagctctgccgcccacttgctgagccagccagtgacttccttgcctcggagtatttcgcccaaggggtactgtgatggcactatgactttgtgggcctggaagtagtgcttaagcttgcgtgaagccatcactagggcgtaagcgagcttttccatttcaatgtaccttgtcttcgctccttgcagtgcttcggagacgaagtagaccggtttttgtccgaactctgtttcttggacgagggcagcactgactgccaccggcgaagctgctaagtataatagcagtttgcttcctggggttggccttatcagagctggtgggctttgcaagtattgctttagctcgtcgaatgctacttggcactctggtgtccaattaaactttcctgcgccccggagggtcttgaagaagggcaaacctctttcggctgcctttgagaggaatcgactgagtgccgcattcggccagcaagcttttgtacttcatgtacgcttgatggaggcttcatttgctggatagcatcgattttctcgggattcgcctcgatgcctctttcggaaacaaggaaacccaacaacttgcctgcgcggacgccgaaaacgcacttctccagattcagccttatgcctgctgtgcgcaagctgtcgaatgtctcctgcaggtcgatcgcatggtcgaaagccttgcggctttttacgacaatgtcgtcgacgtaagcttccacattccgccccaactgcttgccaaggaccttgtacaccagcctagcgaaagttgctcctgcgttccttaagccgaaaggcatcctgaggtgacaaaatgtgccgaatggagtgatgaaggatgttttggggacgtcgagcaggttcatgtgaatctagtggtaaccggaatatgcatctaggaaactcatgagcttgcatccagctgttgaatccacgagctggtcgattcgtggcaaggggaagtcgtctttcggacatgctttgttcaggtctatgaaatcgacacacatgcgccatttgccgtttgacttccgcaccagcactggattcaccaaccactccggatggtcaatctcttggataacccccaccctgagcaatttttgtacttcagctttcgccgcttcttggcgatcggcagacatcttacgcaacttctgttttcttggcttaatgtccggcttgaatgctaggtgatgcataatgagatccgccgggacaccccccacctcgtcagggcaccaggcaaagatatcgatgttctttttaagcacctgtaggatactctcaacttcttcttcgcccatgtcgccccccagtgatacgagctttgtggggtcggcatcatcaatctgcacttttgttatcttgccgtgaggggtgggctttggcgtgtgcttcggccgttcatgcggttcggtctcaacactgttcactgctctgttgattatggctagatcaccttttgaagcggccgaaggctgaagccccttgactactatcacccctgtcgggccgggcatcttgagcttgagataattgtggtgggaaatggcttcaaacttgttcagggttgcacggccgaagatggcgttgtagttgtacgggatgtcgacgacgtcgaatagtatttgctcttcgcgtctgttctccccctagccaaaggctatcagcaaaagtgcttggccaagaacttgaactgcttctccgccgaatccgcggagcgatgctggtgctggggtaagggcttgggtaggcaaccccatcttggcatatgcttcggcgaagataacatcggccgaactccctccgtcgaccaagattcgtcggacttcgaaaccagctatctcagctgagattaccaggggatcttgatgcgggaacataactccttctgcgtcttccggcctaaaagaaattagctggttcagatactgcggcgctccttcacccgccgaagtgatgctgtggaccatacggatctgcatcttcttctgccgtttggacaactggcttggcgggtcagcccttgtaatcacttggattacccttcgctgtacatcttggcgttgttcggctgggggtgtttgctcctgaactgcttcgcggggtgcttcaacagttgttccctgctgcggccttgggtcttgcgcgttgccacgttgcctaatgtttcggcattgctccgtggtgtgcgaagagcgtccgtgaaaggcgcagtagaggtcttttcggaccttcttgcgggctggctgctgatggttgctcgcttgctgggcatcgaactccttgcggagggcttgcacttcttcgaccgccatcacagctttgcccgcacggcctgttctaaactttctccaagttatgggggcttggccttgccttggcggctgtccttggatcgccggctgagactggcgaacgaagaggggaggtggttcggcaacttgaacttgtgcttgagcttgaacagcggcgacggaggctttgtcgtactcagcttgtatagcttgccgtcgcttggaatcctcctcgccccttgcgaacccgtcaatgatgcgaagtaggtgctcgagcgtctgaggctccatgttggcgatttttcttgtgagttcgccctcgagcagaccggccgaagcggcgtttataactgacgcctcggttatgtcttgaacttggcaccgggcttgcgagaagcgacgcatgtactcccttatcgactccccttgcctttggcgaatgccgagtaggtgttgttgcgtcttcggctcctcgtaggtgcctcgaaagttaaggaaaaaaacatcgcgcaattgctcccatgagtaaatgctattggctggtaaattgaaataccaagaacggccgatgccgtctagagcgagatgtattaccttcgctttggtagtttcgtcaccatgagccgcttcgatcgctgactcgtagatggagaggaactccttcgggtcagtttcgcctgaatagcgcgggacgggtgggaacttgaactggggtggaattggacgagtcttgattcccccacttagcggtagccccttttcgcctcccgccctgtttaccgcaccctgctgcgggtacggtgtggcgaagggcgaaatcgcagcttgtgcgcaaggttgggccatagcattcggctgcccggctccaactggaggtacttgctgagccgccatggatgggtcaaaaattggctgtgaccacgtcatggtagcttggattggtgcttggtttgttccgaagcctggagttggagcttgctgctgaacggttggcgcctgagcagcgttgacgaagtcgaactgcggtccttgattccacagcgaaactcccaggcccggctgaatcggtggcaaccaattaggcgcaccttgacttgtattcccctccgggtgggccgatggggttgtacttgaaatgcagtggggttggttgagttgctgaaggaaagcttggagttgcgcctgcagagccgaagccccttccaccattgtttgtggcgcttggccgggtggttgatggtgtacttgggcagcgactgcggccgattgctacccggcgaagtacattggcgcttgtgcgacttgaggtggaaagggctgggtcgtcacttgcggatggacttgaggcgggacataacctgccgaatactgaaggattggagccgacgtgaccttggtccgccttgccgcctcgtatgcttgttgttgttcttgcatttggcgaagcatgtcttggagccgtgccatgttttgtcgcatggcttctatgtcggcttcggcttgtgtttcggggtcagggctgacttgggcctgcacagcggcgagcgcagtcggggccgctgccggctgcgatggagcggcttggggcaccaccagttggcttgtcgaaaggatctccgccctggtctggagtgcccttgccaccgcagccgccttcgccacgtcggccgcgttcggcacttgcacagaggtggcgggggccgaaggcggttgtgatggcgcagatgtggaagcgaatggtcctcctccatcttcggccacgggcaccgaaggctctgctccctcctcggcggccatgtccggtgcggcgttgctttccttccgccttgcaaccttctccttcatgaccttcttcggtggcattccctctcagtggtttcgctcggaggtccccacggtcggcgccagctgttgtcggaatgacaactgcatacgtcgaaagacgtggttactcaacagtggtaggaagaagacgaagtgtattaaattttgagtttcccttcttttttctccccccattacatggccctaggggactattttatagccccattacaggttcttactactagggtttaggttatataggggaatttacatgattacccttatgaaagggacatttacaggggtacatgatgatataggggctcatgggcccctgatgggctgtctggcgatcgccggccctattgcccctaggcttgatgggctggaaaggcttttttggccctcgcggaggcgaacttgccaaggcgaagtcatcttcctttggcagatagtcttcaccttgcaccctttgcctgagacgcctctggcctggcaaggcactcgcacgactcttcgcctcacgccgttcttgctccacagtcttcgccatgggtttcggcagatttggtcgaagggcctcatgccatccgccaacacattagaagagccctatttggtaaactacattaacattagagagggacatataccacatttgggtccatcatgtgtggactaagaattcttaactactattcttagtatatctcatttagggtcattttttaaagagtaaagtgcacgggtggtccttaaacttgtagaggtgtgtcatctagatccctaaactctcaaaatgcatattcaagtcccagaacttgtcatagtgtgtcatctaagtcccaaatcgccacagccccttcaagttcctacgtggcactgatgtggcatgccacacgaacatgatatgtcatcattttgactgacaaataggactcatttaattttttttctttttttcttatctttttcttctctttcttttttcctttcttctcctttctctgtgacccgagcaaaagaaagggaaaaaataagaatgagaagaaaacaaaaaagaaaagaagaaaaaaaggacacgtcgcgtccatgtggcatgccacattggcgccacgtaggatcctagaggggctgtgttgatttgggacctagatgatacactttgacaagttctgggatctggatcagcattttgagagtttggggacctagatgacacaaccctacaagtttaaggaccgcctgtgcactttactcttttttaaaggcatcatttcatagaccctcttacgcacagagagtgacagatatttaaacaaatttggcccttaggagaaatttgagattatgcctattatcgattaatatcctgacaacagtatcatgaatacctaaggtcgttcatgtcaaggattcctaaacccacatatccaaaaaaaaaaaaaagccgaatgtttttttattggtccaagccaccctacatcatttttttttctaataggaactctccaccatattttgctttgtatatatgtggatgtgtacatgatacaagatatatggaggggaagctctagtctaaatctaagaaactgtctcgtcgggatcctcaaattagaaactagtagctagttgtgtcatgatcggcgacttggtttcttggcaccagttgtcttgtttaggcttgtgttggcttttcgccacttgggttggcttgaactgatctcaataggtttgccttgggtctgcctacaccaaggttcctaggttcccccttgtcctagaaggacatataacttgatttggatattaccttgagcagtactggttggccctaagtaggataatgtctttctttcctagctggaggactctttccatatcagctcaagactatccttatcttggaattgtttccatagaggagttagtcgtggtatttctggaatggtacgtgcatatatggtatcctatatttagtacaccaacaatggcataaaaagagggtttcactagaatgcaatctcttaactgggatcgatctcaacaccgagttggttgggctcgaatcgatcgtgccacactaacccatcagctcctccacattgcatcgccgcgccagcctgggcacccatatgatattttgatggacatatttcaacggctgcagctgtgcgctgcagcttggaccaccagcaaagggcgcggttgacagctcaatgcaagcacgactgaacatgggtttagattgatcctgcttagttcagcatagccccaagggcattttggtccctttactacgtgagaaagggaaaaaaacactaataggaatttgagaatggcattctagtgcgcatcctctatttgagaatggcatttttgcaaagcttaattgaggtctggaattttggcgaaacctgttttcgatgattgaataatttgaaaattttcccttgagggtaatagccctatgtcatgctcagtttgtatatacttgaacatatataatacaatatttggatggggagctcttgtctagacctaatagactatcttgctggggtcaacaatcagggtgttttcgtaaagctctcatggtcattaacgaaataaaattatatattcaaccgaaggacttcaacttctatgcaacacttgtccaacatgaatatcaaagaagacaacttctcttctctaatctgctttcttcttcatctgcttgattgctcggcaagggcgcaaggcataactagagcctaaccagcttggtcccgtggtgagcagcatcattctcatggacggatgccgggagagtgtgaggttgagactgtgctaagctgctgctattgattattgattatcagtaagggagattgaaagtaacagaagcaataactaaccattctaacagttcaccattagtcaccatctaattgtatcctagcaggcgttcctggaagtggcctgacattggcaggtgccaccacatccacggtggtcatgtctagctctgtcttgccgagcggaggaagaatatattgggggattagagagaagagagaggttgcctactttgatattcgtattggtcacatgtagcacaggggggcaaagcccttcagatgaaggaaggacttcagtcatgtataattttctattgtcattaactcaagttcttgtgagttgtttggcttgattggcttgactcacatggccttgtggcctctctatatttctatcattgtgcttccccatatttgttttgtttcataaattaatttgttcacgtcacattatatacagttgtatagcattacattttcccatagtagtgctgtcaaagttacgcgatttccctgtatccaccaatagacttcacagataacaatctaaaacaggttgtcaatactagtaccaccaaaataagcacgaaataaatatattttgataagtggaaataaatccagcaaaatgccaggttgtactttgtttctactatagctcctagtgggaacgcgttcgtccaactctcctatatatcacaacaccatggacatcaaattcgcactaatcctcccccttcatcccgtgtcacaaagccacaaagaagtttagcaggtcctccatggcagcctctctgccactgtcagctgccatcgttggagccgaagagtcggttgacaaggaggtcttggagatggagtacctctttgagaagtttttgatgccaagtgacttgtgcagcaatactgaatggcttgggatcccagaagaacatgttaggaaatttggcatgatgttggaggacagggacggttactccgtcattttctttcaggacggtgtggtgcctgggaagttgtggtgctttaggtactggaaaagcaatggagtccatggcttgaccaagggctggaggtgctttgttagggagaagggcctcaaagccggagacaccatctccttcttccgaggatctgcatgtggccgtctcttcatctgctgcaggttaggcacccatgcaacctttgcgtcatcctccaccttgcatcatggcttttctatgcccccaccacctgcccgcccgctggtgggtcttcaatctggcatgttggcaagagatgtcccatcattaggacaagctaggttgcatgatggaaatcaagatggaggcggtgcaccatcaagacatgttccatcctcaggacgacgtgtggaggcacagctatcacgtgtgtcgtcgcgccgtcaacgccgtactatgaagcactcgataccagagcccacgatagagacgccaccaattcttgagtcgatgttcctcatagccgcaccaccggcagtgaagtgcttacggctttttggcgtcaacatctatgtgttgcctgtgtcctctagtggccagccaaaacaagaatccagcccataataccaggcaccataattatggacaccccattgaagaggatcagagcgtgttggaggcgacaaatgttcctcaattgtatcgtttggttctacatcattcttagatcattgtggtttcaattattgtaattcttagtttgttatgattggttttctattggcaattattgtctttttggcagttattttagcataagaaattattttgtaccatcttcatttattaatttcttttgtttcattcccatcatgtttggggtatttgaatactttaacttccctactatccattttcttaatatataaaaagtaatcctatcattaatcatagtaattaagcaatatcgggccaattactgtattccttttttggcataatattcaacaaaatgtatggttgcttttcatatttctacattattgcaaattggatcaattcatcattgctccttatgatttaatgttgtttgatatttgtgcacacagatacaaagtgtatgactacatggtggtggcttccccaaactagataacaatatataaatctatttgaactccaacttcttgtcccgtggtacccttgcctatcccaccaagcgatgccgcttaactctttctagtaatcacgcactttctaactactacaagaacagaaccatgggtcactaccacaaaacatctaaggtttccattttacaccacctataaacatacttataaacataaaaggaaatcaactgtttataattaggggtacaacctatcgtccaaataaagaatagtcaagcgttttggtcggttccctaagaactatttcatcaatggaaaaatgaagtgtgaggtgattcaatatcaggtgaactgctggtcaagaggagtggaatgacatgtgggatcacaaatatggaatgaggcaacaacgctggatggtatggtgtgttcgccatacaaaaacgatgtctaaactgtattatatgacaaaaaaaaaacttggtctttaagaattatcataccgttgggttcattccattcaatgtcaaatggaaaattactcaatagctcatatggtttaatgccaaaaaaaaattggcaggctgttggtatttcttacgatcacagataaatccgcaagcgcacgaaacaccgttgtagtacttccccttagagtattccaaccgtatcgaacacgaggaacatgtgtgtattatctactgccaagattcgattgaaggacaacaacccaagataaattagctagagaggattcctatgtcttttagttagttacttaagttacttaaaggtaagactctaacaaatattcgggaaccggccctcccctggtctactaggataagtccgggcttgagctctatgatgtacctgaacgtggatgaatacagaggataaacttggctgtcaccacctgccccctacctcactttccgtgggcacacaacaaacgaaggtaatttctaacctagacaccacacctaagttattaattactactctagccttgcacgggaacttccttctttatccagagttctaatactagagcactcaagtgcacactaagcgatgaacccgcaccgataaaaatgtatcacttaaataaactaattaaataacataaagaaactcgaatacttaattaaataatggaagcatccgacaaggtacaagcgatagagcaaaggcgacaatcccgtcatctatcaaattgccaaaatttcagttgtcacgtcatctatcagatgggccatactagtatcagaaatttcctcagaaaactatgacaccacattatccattgtttaccttttattaccacaggattgtccattagttactctctctgttcctttatgttaatcaccaagcaatattcatattcaaacttccaccattcgtcttctttacagaaaaaatctaaatacttaaatagaccaaattaatacgacttaactagccatatagcagccttgtacttaggctgagtttgaaggagtatttgggcggaattttgtcctcatttaccttgagcacactttcaaaaatactaaatggtgtttttcatataaaaattgtctatataaaagtttgtttaagaaattatattaatacattttccaagtttgcatgtcacagctagcatttccattggcacgtctagcatgagaaggagcttaatcggggggaggtgcgcagtaaattcgccacattcaacagaaataggcaaatagctacgccatcaagagaatccgaaattaaacttctatgatcgtctggcatttgtgttctccttatttacgccctgccttaaaataattttcatgcatatcacgtacgctatctacagttgtccggcattaaggttttccacggtagtagtccaaaatcacgcatttttcctggagtcctgaagaggattatttacagttgacaatcgtgcatatgccaatgtgaatgactagtgctgccaaaataagagagaaatgaacatgtcctgataaataagtagtagataataagccagcagtaatctcacgattactagctccagcaaaatgccaggcttgcactccatatttgcactgtagcctccagtgggaatgcatttcattcctaaaccccaattaaaaaaaaaaaaaaaaggtgcttggacctcccctatatatgtgcccgtaccatgggcctcaaacacttgacctgctccttcgatcgtccaatcctacgaaaccacagagagaatctcagagcggagtactccgatccatggcggcttctccgccactgcctacttccatcgatggtggtcaagtgctagatgacatggaggtcgtggagatgaagtacctgtttggcaaggtcctgatgccaagcgacgtgtcctgggacaccgaacagctcgtgatcccggacgagcacgtcgggaaactactggacatggtggtgatgaaccggccggaagggggcttcttcgtcgtcgtcgtcgaggatggcgaggtgactgggaagctgtggcttttcaggtactggaaacgcgacgacgtccactgcctcaccaagggctggggttgctacgccagggagaagggcctcagagccggagacaccgtctccttcttccacagcaccgcgtgcggtcgcttcttcatctgctgcaggtgcacctgcatgagtttcttgtcactacccacaacatcgcatcgcattcacggctcgtctgtactgccgcaaccgcgggctgcccaggaggcgcaccatccattctcaggacacgccacattgtgtctcggcaacaaagctagtgatcacagcgcgccggcaaggcatgccactgcctccttagggtgtgcggcggcgcagcctccgcaggtgccgccgacgccgacgccgcgtcgtcgacggcgcagtatgatggttcacccagaaccaccggagcacacaacggacggcatgcctgtgattctcgagtcgatggcactcgtatccaccccgcccgtggcgaaacgcgtgcgcctttttggagtctacatcgacgttcctccactgcgcccaggcggcgaggcaacacaagatttcaacccatgatgatggcgtgccatccgtggacaggaacgccctcaagaggaggcgagctgctgcggacaattaacgcctcctgatcgaattgtatcgtttagattgcaagttctgcgtcattctcgcggctttgattattgaattcttaatttgttaggactttggctcctgaacaattctttggtgaatattatgttttttggcaacatgtatggcagcagaaatgtttttcatcatcttttatattaaaattttgtttcattcttccatgcaggtcaatggtgttcaaatactttaactttcccaatttccatttccaaatcagtagcttctttttaaaaaaaaaaactaaaacactaatttcttggtcatataagtataatcctttcatgaaacccgataattattacaattagctgcccaattagtgcattccgttcgagatatgaacaaattcaaggttttcttttcacatttctacattattgcaattgaatcgattcatacagacataatgttgttcggtattcgttcatatacacacaaagacgatgttttcctgtatatatgtcatggtatttccattccggatacatggtgatgggtcccccacgtaacagtgaatctagctagtacaactccaagtgataaggcaccatttcattcgacttagctgatctactctcttgttttcagtttcttgtgagcacactcttcgaagtgctaaatgttgtatttgttttaaaaactttcttttgtagaagtttctttctaaaaaaataaaataaaatatttatttaaatttataatacttaattaatcatgtactaaggatatgctttgtttcacgtgtggctgattaggcagcctatataactctgccaaactcgacctaatctacttgtcttgcttgtcccgtgaagagaatctctctagctctttctaattcatatactcctcccgtcctaaaatataataacttttagccattaaaatttttcccaaaatataataatttctccactaacattctctttctaaccaatcacaaccctccaccattcacttttcctaactacctccactactcaaccaatcacaaccctctatcattcatttctacctactttcttgataaccgtgtccacctctaaaaatacttatattatggaacggaggaacgtagtagtatttatgcccttcctaatttgtggtgatgaaggccatgggcataggcggccctaccagatcaaccggccttgtgactcgtgccactggaagacaaccattaaagaggagcagatgggcaaccagccatccatcttgtaggtgcagccaatgtgaacgtgtcccgatagcccagcagcccattaggccccatctacagttctacactctctccaccttatctctagtcttcctagcgttatattgagcgcgaactacggaatgagcggcccttcggctttggcgatgggagcaggagtgggctacacgttgacgatggcatcgcaacgacggcctctccccggtgagctccctccgctctccctccagtgcgaagtctagatcgaggtcagcttcgattccttgcctcctctgccactggcgcaaccccgcccggtcggcctccacccactccccttcgtcttgctttgcccccgccaccaccagctatcgatcctacaactccggcggcgccaccgccgcctcgccacctgcctttgtccgcctcccaccaacggttcatcacctcataggccatccccctaaacccgatgccccacttcccccttcccattgccaccctcctctcacttgatcaagacatggtcccgatctcccggtaggtatcaataagtcgattgaggataactcaacgcgggtgatctaaaggctccgacctgaattattgaacccctcataatcactacaccactgctctgttggttatcaattgtgccgaaacacattagaacccaccaagaaggctatttcctagcgaatcaatagtacaagcaagagggttgcagaagtaatctgaatattacaaatatacgatgaatctcccaagtttgtgttccacaaaccgaactagtggcaaaattggatttcgcaaaataatgtcagcaaaatccgacatgagaacggctattgaataaatatgattaaaaacatcctagggttagccttaagtccaaaaattgtttcgaactagataaggtacgtggattgcgtttacaattctggacaactcggaaggaattttgacatgaggcaaataatgtatgaaagtggactcataagttctataacaaatacacataggctctaagagaacttctggatcagcagatatgtatgtttaaagttgatattgtcagaagacccgaactcacgaacaaaatttatctcttgtctattatagttaaaaaatgatgatgaagcatgagaggagaatagggcaaggcctgatgttggtccccgatccacctcagtgaccatgcgaacattccctgcacatgttccactttgcttcacccatacgagtacttctgcaacacacaactcaatgtgtagcatccttcgttcaaatgcatgtctaccataataaacatgcaccttgagttcattgatgatgtgtaacataaatatggtcatatccgagcagatgatgtattgatcacaaccctatcctcgaatccaaacccgagcgcttatcgtgccaccatcggaatgtatttgcgagaatcccatcacgcacatgttcacaaattaagttttacatcatgtcgtactttactcttgatgcttttctataaataccctgctagagtggaggaaatcgtgatgatgtgaaccaccaacttgtccatccactggcaccgatcaatgatcatctactagtcagtttgaaggatgccaactgatgaaacccgttacaaaagaaaaaaagaaagaccataattttcaaaaaaaaaaaacaaagaaagaccatgctcagccttgggtacctgatctaaaggaaaaattaggcgcccattatccattgttgggcacacgctctctgctaggagcatgtttggttgcttgactacactcagcctagtgcaggcaactaaacaggcatgccccctctttgtttctctatgctacaatttaaaaggacactacttgtgtagttagctagtttctcatcttgtatcttcctcactttaaatggtttttctcccaaaccacctatcctatttacgatctaattataataaatatttgttttgatttaatatttataataagatcaaacacgactatattctgataaaaaatatatgttttaactgttaaaatttgatgcttcatttataagaaacaaatgttttaactagaatttaattatgttgcacatttaagttttttgttacaagaattttttcaatgttgcacatggtattgttttaatgtgtcatttaatgtttacaaatataacagatttgtatttttttaattgtttcagcaaatagattggaatgtatcaatatttacaactccatgtttcacgtatgatataaaaaaatgtttcaattaggaatatattatcacatatatttttttcatcagaaatataatcatgtaaaatcttgttgtaaaggtttagttacaatgaattcaacggtgcaattagattgtatatcgaataaattatttaggagaaaaaattatttaaaatttgataaagaaagttgttttttgttgagagaaaattgatgttgtgtagcacatcatgcatggaaaggttaaggtaacaatgagatgtttttttcttcgatatgttaaaatcgggcagggtactaagacaaattcatccaagaaccacatttggcacttttatcaggttagtatatgcccttcgatttattcgcagaaagaagggcttactggttcaaaccaaaatataagttaaaaggaccaatatccttctttgcttatatgaattgcagtcaagtaccgtagcagagattttctttacagtaaacaccacaatattacagcagcaaaatatggatttccaaattctttgctaggacaattagtttggtgctacaacaaaaactgctccagtagcgcaagctcgggagaacgagtaaatataacttgttatataacatacaaaaactgtataagtaattaaagaagcgcatatgaaccaacaatttaaagtctcaaggcagcaattgcttcaggcctgaagtcaatccgaagccctaacaccctcctaacctctgctggtgtcaaaagccatgtcagatgcccggcattgtcaccccagaaatccagtatctccgatacccgctcaaaattcagaattgttgacatctgggaaagtcttgagaacttgtctcggactggtctctgtgacatttccgagaaatggttgatcagggagcgtacctccttgtcgagctggagcccaccaagctggctgaacctcttctgcatcattatcacttcaagcctcttgacaatgaagtcgatgattaagtgcacaaaggaatcatagttgtttgatgtcatcacgggctggagccatgcaacattagtattaactgtaaggagaagcttctgcacccatggatcattcacctcattttctccatattcggcatcatccagctcataactgacagtggcaacagtgtccagaacaggacgaacacggggtgccacagatgccactaaatgctccagtccagaatgaaggatcttcttgaaggaagcactgatctcacctagctcagataaacaggatttgattttctctcggtcagcaggagcatgaaaagcctgttgaacaacaggaatagtcagtacagctgggttgtcaacacgaaaatactatgctacgaacaaagtgattttatcagataagagtgaaactattagttgtttttggtgtaattaaggtattttgaaagctcattgtaaagttttaatttgccagcaggtttctcccacattcctaattcatttttgacatgcgcatggtctccaatacatacatttgacaattaaactttctcaatgaatgttatcagcattataatatctacaaaattcctctttcaaatataatatggttggatttatcatgtgacatgtctgtgtgttcctcaccttatcatgtctattttgcagtaaaaccatgtgtcactaacttatttcagtcaatcaaatgcactacaattcagggttgtaagcacaaatgaaccaactaggtaacaagtaacatggagtccctaagtccatcgcaaacacagtaataagatgtgtgcatgatttatgttccatacttatttcatagctaagaaatttagaacgaagcactcagctagtcagcttccaatcaggtacgcagcatcccagctccacaaccccaacagggcagtcaaattcctccatggaatgaagcagctggaggtagccaagttttactagggagttcagtgcttcaatgaggcagtagcaatgcacttaaaatattgttggtgacgactggccacaagaccacgctgtggcaggccttgtgcaatgggtgtcaaaaatgttagacatcaaaacatgtttgttgctacaaatatgttatccttttgcaatttgttctctaaagtgttgcaattgcaactattccttctcaatgatacaatgttgcccagtagatattagctagactttttacatttgttgaaccaagggggcattttgctgcaattttgttatataaatgttgccgttcaatgatttagaggcacacagtaggatgcctaagactaaatcactcaggggacgatgcgacaggaacaacttccttcagacatttgtcaagtccttctagttccaatgtaggaaaaaagctaagaggaatcaaggtcaaccatgagcatcggatttaatcttctggaaataaaactatgactacatttcctacccatctgcaggcttgccaaaaaaaattactaccattttttccctttatttcatggttgtgcagaaagatgcactttccggtgacagcaggtcatttgttttcaggaagcagcagcatgtatttgacaaatctcttcaaaggcagcaaccattctgctaccctccaagcatgcaatcatcacatccaaatatattcaactagcttagggggtcactggtggaaacctgggagcgttggtttgcaaatgcatctgtatgacaacatgcatgcaacatttgatcgttttgggtcaatggtgagtgggtaagagcacagatacagttcttgctcttgaaaaggctccttagagacgtactagttcaaatagctgcatgctaacattgattttttgtggatgagtgagcacaatcactacaaaacattgtgcaggtgtgacagatgcagcaaactgtttcaatttccttagcaaaagttagcctggtaaagtgaacattataatttgacagatattatgtactagacaacaatgttgatcagatacataaaaataggttacaaattcaagtgaaccgtggagggagcgaacaaaatgaactgttattataatgaaaaagaaaaggtgagattgcacaatttgtagcttttatctccatccaacaggagatagatttagcaaatagcagtggaccgttattgaaaacaaattgcaccataattgtaggaagttcctaaagatttatctacaggttacagcatagctaaatatatcctaactaagagactatttattcaaggaagacacatataacccttttacatatgtgatgctgttttggtgccactcataaggtgtgacaacatgatattatcaactactttctagaggcttctttcactaaacaaattacaagaactggacaaaagcaccgatatcttaaattgtaataactgagagactacttgattaatcatgatatcttaaatcccaaatgaatgcaagttatgaagagaagaaaaggttaacactgacctctgaacagagctcctcaatctcatgacggagcttcaggacatactctgagctaacatccatgttgttcagcgcagttgcaatctcctcaccagtcttctgaacaccaacaccaccaagaaagagctttgcacccaagtttggttccctcatcctccattgcagtgcttcctggtactcattgctcagtaggctcgccgccccaccaagcactgcaaaaattgagtttatacttgcagtggatgctgctcttcggcagcaactctgcagtacgaagaacacatcatccaccattgatgttgtgagaccatcaggcactggttcatcaatccggatggctttccttacattctcaaccatgaagaattcttccaggatcacataaaacccagttaaatcctgcaccattttattgaagctaccattccggaaggacttcatcgcttgtggtcccagctcaggtttgacatctcgcaatccacgaatcttattcaccataaattcagtatagtcttcaccaagctgtgtcagtgacagaatctcctcaagatagagctcgacctccctggggtcaggcccttcattgccccctgcagcattggccacagaactcaccacagagaggaggttcttggtatatgagtttatatccgaggcaagacgtgcaagtttcctgtaatcagcatatcggcgcagtatctgtgtgccccgggaatcacactcctcctgcagctcaatgatggcataggcaacaccatcctcacctctgagttcacgaagcacagcatcattctcctcaacggccaggacaatgtccttgaagagacgggtaaggcagccaacaaaatcaggccgctctgaagtaggctgtgttgcagaggttaactcagctaggtgctcgaagtcggcacgagcgcgcagggcgacgaccttcttgaggtaggcgacatagacctgcaatccctcatcagcgagagcgaggagagggaagaggcggacgaggcggagaacggcgggatggttcagcgcgtccacagcatccgccagccttcggcgcgcgagcccctccagcctgcgcttgatgtccagaaggtcgcggcggaggtcgtcatcggtggggaaccgggcgtcgatggcgaggaagtcgtgcgcggcggtggcagcggccgtgagatcatccgccgccagagcacggcgtgcggcgtcgagcgcgcgggacctatcgagcgccgcctcggcgcgcgcgagggcggcctccgccctggagtgcgcggcgtcgaggtggcgcacgcgggaggagagcgcctcggccagcgcggcggtggaggaggaggagtccctgagcgcggcggcgtcggaggcggcgagcgagaggagcggcggggcggagcggagaagggaggcggcggcgcggtcgaggtcggggcggcgggcgaggagcgcgtcgaggcgggcgtcgagggcgcgctggtaggcgacgcactcgtggaggaggcgggtggcggcgccggcgtcggtgagggcgcggagggcgacgacggaggccgggtcgccgaagtcgagggacggggcggtgtcggtggaggcgtcggggggcagcgcggcatcggggcgtggggagcgcgggatgggcaaggggtaggacgccacagccatgccggccagccgcggcgccggggatcgccgagatctcggtgggtaattcgcgggatctgggtgctctcctctcggtgctctctactgtggcctgcctgtgggaggcctaggggggtagtttgccgggctgcgggtgaagggcatttctgcggggaaaattaatttgctttcgaatgtttcattgttaagcaaactgtttttatttaaatctaggttgcgagctattatattccacattgtgagagcatctctagcaggggtactaaacacagcccctaaagaaattttgagaggtaagacaaaaaaatttagatccaacaaagcccctactaaaggccctaaaataggaaggcctccaaattatcccctcaagcccccaggcctacgggccttctccctggcccctattccacgcgcgggagagaaatcccacagccgccgagccgcgcgctctttttttttcgcgcgaaaacttctgctagcgccgccgctaaatcctctcttccgcatgcgcaccgcctggatcagcgccgtcctctccaactggccaactccttcctcgccgcactcctccctggcggatcatctccctggccggcaacctcctccctggcggcctcctgccctaccggccacctccctgcccggcggcctcctccctggcgccctccctctcggctgccagcccgcccgacgccctcctccccggcagaccacctccacgtcctgcgcccttctccccgtccgacaatagtcgaaggtattttttttctttttccaattgatttatggatgcaattagataagacttgttctttggtgagatttagcttgccagggcgataaaatggatgtgtgtatttagaaatctatggttggagcaagtattttaatctgttcacttgttcagagataagcatgcaaaaatttatgttcttttcagatattagtaggggaaattaattggtgagaaagaatctggtggtgatcactttgttgtattttagtgatctaaaaaaaatcgataataccacaactcagtaggcagggggaatgataaattgggtcgagctaatatggttttgggcaaagctccttccctttctattactgaaaaaatgaatagttcttaatgcactctgtaaataaatagttcttccgtgcactgaaatatctagactacttacattgcacctgttctgcaacagtgcatatgcatgactttaagacactgtgccacctgaaatcttgtgatcgtattctagttatatgcaggttcttcgagcaggctgttacaaaaagagaaaaaaaaaagctgctctgggtgctatatggttttctttttaattcaattttgtagagctctaccataatctgttctaaattctaatgattggaaaaatttgctaccattatgcattctaccaacatatattagctagtatctgccatttttcctgagattgattagagaagttgttaatttatctacttattgcagtgactagattgtgatggcaagtgaatgtgattcctttgtgcgcacgatgtccgaagagacccatgttgaggcatattccttgccaatgcaaaatgaagaccttcatacttcaacaaatggtgcaaaaggaagagccaaaagatcaagcaactttaatcgtaaggaggacattcaactatgcatttcatggcaaagcattagctcggatcctattattggcaatgagcaaccagggaaggcatattggcaaaggattgcagagcactaccatgctaaccgtgattttgagtctgataggaatacattctctcttgagcaccgttggggtaacattcagaaggaagtaagcaagtttcagggctgctacgaacaaattgagcgtcgacatccaagtggcataccacatcaagagcttgtaagttaaattttttattcattattattaataacaatcttgtatgtatgtgaactagcacttgaattttgctataggttcttgaagccgaggcattgtactcatccaatgcaccaaagaatagggcatttcagtttaatcattgttggctcaagttgaggaattctccaaagtttcaaactctaaaatcccacaagaggccaaggtctaggaagtcttcgaccccaattgagagtgctggtgaagaagatgaagaaggtgatgatgctaggaagagtacaactcctgatttatcacagccaagtgctaaaaagagaccaatgggtaggaaggaagcaaaggagaagttgaagaatggaggagaagatggaccatacaaggaggcgatgaaagatttgcttgacgccaaagagaaagaagctaaagtgaaagaagagagatggaaggaaactaaggagattcaagagcacaagctcttatttgctgagcgtaagttagtgtgggatcaagaacagaagatcatgttttgtgatgtttccaccttggaaccagatgtgagaacatatgtgttggctatgagggcacaaattgcagcttcaaaggtggctgccctcaatggtggatttgatggtagtagtggctttggaggtgagtttggtggtggtaattgagaagtttgagcacttcgatggaataagttggatcatattggatgatccacatgtcctttgctagtaggatatgtcatttccacgattggttcttggagtccttttgtgttaatttttgcaattatctaagtgtcatttgctagtaggatatatattacttttagatttgttatttttatgatcgaaccattcattctttcttgtaggatgtgttatttttaaattatataatgcatctccgcaaaataaaaataatgcatcactgggttcacatagcatattgtggtgatatggagacagacaatgacatgttggtgagcaatttttgttttcattggtgaattataaatcttggttgcgtgttgttgtatatggcattgtgcctacaccatatttacatgtttgaaaattttgattttcgatttgaattgtggtgtttgaaattgtaaatttaactatggttaaattatgcgcgttagaaatatttatgtttaattattgtggtgttaaacatagtgtaaaaagggattgcatgctaaaataaaagagaaacaatagtaggggctaagaaataggggctattgctagagttggaggtattttttgggtccttgggagatgggggcagccctcatttaacttttaggggctttaaaataaggcctattgctggagatgctctaatgttatgaatatagaactaaccatctacgactccctgttaggatgtatgagtaatttttaaggcctcctttaaattatatgaataaagaaagcaaagaaatagaaaaaacgcagtattctaactagaatagaagtgttaaactgatgattgcaaaacatataaaaacacaggaatgaccgcttgattggaccgtaggaaaaacataagaatcggatgagagagatacactcaaagtaaattttccaagagctttgagctcttgctgagtttctttcaaaatctctataggattattcattccataggaatttcaaatgattagaaatgattcaatccgttaattaaaaggcatttatagaaatttttcctatagaattgaaatcatcccaaaattcctatatatttcctccaaatcaaagggaccctaagtgagtaccatttacaaccaactccctctatttcatattataagtcgtttgacctttttcttagtcaaaattctttagctttgaccaaatttataggaaacaaattagcaacatccacgacatgaaattaattttattaaatttaatattaaatatattttgataatatgtttgttttgtattggaaatattagtatgtttttctacaaacttggttaaactttaagaagtttgactaagaataaaatcaaacggcttataatacgaaacgaagggggtactcaaataaaaacagtttgcttaacacttactccctccatcccataaaaaccaacctataattgaatgggacattattgacggttattaagtactagtttcaaccgccaactagcacaactaataaagggaaccttagggcctgtttgggggagcttcttgctgctgcaacttctatcaaaatcagaagctcccccaaacagtccagcttttggtccagattctgagaagctgtagttgtagaatctagaaaatgaactagaatccagaagctggaaaatccagcttttccaaattctcagaagctgactaccaaccagctgcttctcagaatcttaagctcccccaaataggcccttagcatgtcttacacgcataccaataataaataatgtagttgtattaggattggaaaattaatgtggatgcatgaattatacgccaaagtgaaggagaaattaagccggcatgcaaagaaaaacacctccagtgaatcacgtgcaaccacacggatttaggggccctcaagtcagctcaaaccgactcaaagtgggaccaaacacccgggtaccttcataggggcccacatgtcagtccctcaccaaagttggtgagcagagtggttgaatgggttcggccgaaccaatcttggtgcacctgacacccatcttccacgtggcgactcctcagcgctccccaatgacggttatgcgcagttagcggcccctaactgccatacaaccgtcattacaaggctataaatagagcttctctccctcacatgcaacacacacctcatggagcaattcactctttcgctttatattctctatagtttttagtaggaattaagcttaggagtttcgatcctatagtcttcttggagttctggatatgtctctagtactctcttctttgtgtaagattatagtcgaattaatagtattatattctttatttatatatgctcatattttattttatataattctttattgagtatatttcctatgagtagtatatactttgtatatttgtttcatcctaggctagttgatccatgctaaagtaacggtccaatgaccttcataggttgctctagctctaacttgttcatcccctagggaagatagtgatattgtttactagcataaacgtggtgtttaggctagataaatatcgttggatgtgggtgtatcccacggaaagtgaggtaggcggcaagtggtgatagccatgtccatcctttgtattcctccatgttcgggtatgacataagagtgcataaatgccataactacgttggcaaactagcagtgagtggtttctctatagtacctgggcgcctggaactatatcctacattgtaagtatgtatatgttaagtatatgcgacacgattagttttgaagtacaattgtatcgtaatatccttaggctattcctactagacaatctttagagatgaatctcttgtgtgtgtacctatcaaaccttatcataacccctgtctagattgcagaaatataaatacaatacccttgggaatactcatgggtgaaatgctacaacgatatctgtgcacttgcggatttatctgtgataataagaaatatcaatagacatatctagtacaacggatatggacatactcctgtccagattcgctgtactaaatatgtcccatccaatactaggttggtttttttatgggatggagggagtatattaatttgtagtggtatacccacaaagtaaaatttataactctaacatgtaatatattatagtacgctacttgcacatgaattataacacaagttagataacataatctaatcttaggatgtgtttggttggaaggatataattaaataaaaatgtccatgcaacttttatatgtgtttggtaagagtgaatgggatggtcaggagagctaaagagctaaaattggattattctatgaagatgttggaattcattcgataaaattgactcgatatccacgtcctagggtctgtttggcacagctccagctctacctctcctagatcccagccaaacagtttcaactccacctaaaatgggagcggagctaggtggagcgctctcataaaatgaggctgttatacaactccaccctagacttaactcctgaaactaaatttaggagttagagttctaccaacaggcccctaattttgattattaataatggggcaattgcaaatttaccactactttgaatcattattgcaaaactgccactagaaaattgcaaaaatgccactagaactgtcattcgagtggtatccttgcaatattcaaaaaaccggtggcaaatttgcaaatgccccattaataattgattaataataagtattacatgttgttagttaataattaacttgtgaaaattaatgtcgattagacataattagtcaattttattattaactagtatagattatggcaagaataattataattaacatagaataattagtagtttatgttttcattcaatccgtcctcttctaaaaaaatgaatggccatatccaccctatcaaaagaaaaaaaagattactatatcccttataatatggatgcccatatcctatctacaatcttgatcatgaaccaaagacacccttttatactctttgcatttcaaaatatggttctctaatgtttgttgcaagaaatagatatgtaaattttgtgaacaatgttactatcactttgtcggatgaagaaatgaccaaaataaaagttgtatgtcttgatgagttctacagcttttatgttcatgactttttcagctaaaattatttactacaaaatatcatttgaagttttgaaattcaaattttagttgataaaacaaattcacaagaaaaaatgaccaaaataatagcagaaaaaacacaataaaatgatagagcatgattttagaaacatttaggaaaaagaatcatccaatttagagttcatatgagtgagataaactaatttcaaattttaaaattttattttcgcatacggctccttaatacacccgtatggaaaaattgatttttctatgtgggctcttaagtggtccgcatgcaaaaatgagcttattttggcgtcttaaggagtcgtatgcgaaaacaccgacgcagcaagttgtggtccgtttgcaaaaatcatagggtctcatacacaaaaatcttttgtgtagtagtgatgggtttttatattccgattaatattcatcaccgtattcgtttcgcttattcgcttcgtatttctattcgataatattcgatttcgttttcatatccgggttttcgattccgaaaaaaattatgaaaacgagtatggtaaagctagtttttgaccgtattcaatccattttcatccctatatattatgttatattattacttgcatgtggcagcccttagtttagttgagtttgtttcctctttttgcagcaattcaatttagaaactcctgtcttttagtcaagccacatacgcgtaaagcaaatcctaaactccctcctatcctaccaaaactttagtttcatgcttcgcactaacatgatatcattttttgaacttatctgacatgacaacaatatttccatcactcttactgtaggctaacaaaaaatgcactttacaaagtttaaaaagggatatctatgtattggacaacccaccaaccacataaaaccaaattaaagatgctccacatgtactttattgcatcatcttgctaaaagaaatagatatacctcatgactctaattaaacacgtcattctgcatagatagataaggtaatattttccttttttatatattctcctttgttttgggtatataaaccctcctcctcctacatagctagtcatcagtagagagaagctagcaggtgactaccatggcatccatgtctaccattgtaccactatgtctaagcctcctcctcttctttcaagtatcgatcgcacaattttcatttggtggaggcccactatatagctcacgtgggtttaggggtgactcagtgagccaacaccaatgtcgttttgagcatctcgccgctctaaaggtgactcaccgagacagatctgaagccgactttattgagtactacaacaccgaggtacgcaacgagttccgttgtgctggagtgagtgtgaggcgcttggtcattgagagtaggggcttggctctgcctgtgtatgccaatgctcacaagcttctctacatcatccaaggtctgtataccatagtccaacatattatgtatgtacacacgactagttgttttcgaactacattattgttcacaacatgtgaggttttttaattgtgtgagtacatgttgtaggtcatggagtgtttgggatggcactaccaggctgcccggagacatttcaatcggtgcagtatgcatttgagcagtctagcacccaaaaattgagcgatgagcaccagcagcttcacaagttccgccaaggggatgtcattgcagtgccagctggagtggcccattggttgtacaacaacggtgattctcctatggttgcttttttggtcatcgactttggaaacaatgctaaccagcttgatccaataccaagggtatgcccatatatacatctcacaagcataattaatactattccatatttctaactttagtttaatgagtggtaccactaatacatattatataatgcaactcaatatattgagtaggaatttttcttggccggaaagcctacgagctggcagcaagagcagtattcgtaccaggctgaacaacaaagcgacaatcaaaacatctttgctggattcaatccagatttacttggtgaggccctaggcgtgagtaggcaaaccgccatgaggctccaagaactgaatgaccaaagaggggtgattatcagagttgcgcaaggtctccaagcactacatccttctttccaaactgagcaggtccaagaggaacagtcccaagaacagcaacagcaaccaacctggtcaggcagaggttgtgcgcaaaacaatggtctagacgagattatgtgtgcttttaagctgagcaagaacatcaataatgcacaatccaccgacatcttcaacccccgcggtggaaggatcacaagggccaatagctagaattttccagttctcaacatcatccagatgagtgccacaagaactgtgctccagagtgtgagtataaaccatgacaaagttaataagatttttatgcacaaaataatgtaggcatagtacttattgcactgatctattttcctcttctttgtagaatgctttgctcactccacattggacagtgaacgcgcatatagtgatgtatgtgactgctggtcaagggcgcatccaggtggttgatcaccgtggtaggactgtctttgatggtgagcttcgccaacaacaaatcctgctaatcccacagaactttgcagttgcagtgaaggcacgccaggaaggattttcctgggtgtccttcaagactagccacaatgccatagacagtcagatcgctggaaagagatccattcttcgtgctttgccagttgatgtggtcgctaaagcctacctactttcaagggaggagtctaggagcttgaagttcaatcgtggtgatgagatggctgtcttttcaccaaggcttcaccaacaattgtacgctgagtggcagaacagcaaataattaaccaaatatgtattctatcctatgttagtgatttgaataaagtaaaggagggatcaacacctctttttcaataaaaaaatatcaaccaagaatcggaaagaattttatagtgtaattgcgtttttaatctaggacctcttgagaactcaacagcaactagcaatcttaacccttagattatccgggagtcgccaccaccactatgaaatttgtagactcgccaccaccactatgaaatttgtaagtagtagagaaatggaaatgggatcagatgctgaattgaggaaaccccacgaacgccacgaaatcagtaatcaacgctccaactcagttcttgctccaattccctcttttgtgcaaaagctccaacttatccggactagtcaacagttttacctgaggctgagggagataaacgttcaaatgttatacagaggctgactgcattactcgagagatgcatttaaagaatcacttagcaccaccaaaatttatatttagtcttatctgtgagggactaaacagagttcaaaacaagtgagtccagcaggttatatacactcatcttcagaaagaactaaccaaaattcgtataaaatggtaatgaattagtcttgaaatattatgttagcatcagttgcaatggcagatcgacggagtttgacatccacaaacattttagcacggctataaaaatatgttatccagcttggccactacgcccaatggatggttaacacttctcaaagctgggattgcaagaacatggctccataacaaagctcattaaccccacagaaagaaagctcaccaaggaaccttctatttgtcctgaaaagacaaacgtcgcagtgtaaatacaagataatgaaaaaacggcagacactacattttagccatatgtacttacagaccaccaagagcaccttgaatctgttgtgttaaaattagaccacctagagaaccttgaatctgttgtgttcaaatttgtgattttcattgtaagctatactcagtgcacagctctaaaagtgtatttgcaatctagaattgggttgtacaggtaccactggtgcaatcttcttatgatgattgaactccaaattacaacccacaacagaactcagcaaaatgttttcatttactcacctcaagctctggaaggtctaaacattaaatgttgagctcccagcaggtggaacagcaacaacttttcctacagcaactgtcttacctgcaacaatttaagataaaacgtgcttcatggagtcggaatatattgaacttactaagacggagagaaacaacaacatactttatggtcggattacttggacttggtgaaaaaacatgcatagaaaacctaagtacaactttcaatagggtgaaaagcagccaaagagaaggaaacagagtatttgatgactgcttggtgcttgcccattttgcctgactagctatggttaaattttgcagccaactgcacttgcattaccttaaagtaatatattattgaatttgcgagaaataaactaacagagattctgattatatagaattagtgaatgatattaaataggttcatttaaatgagcattagataccttaggaaaaataataacagcagaaagagtatatcatcacaatccttcttataataatttcgataggcaaacacactcaaaatcatgacttatctgtgtccgattagacgtaattcctatgttatataattttaatgtcacatttagaaaagaagacttggtgctacaggtaaaaataaaaacatctttggtacatcagtgttgcatgatttaaacagagccaaacattgatttcagaaaaggatgtatatccttgccttcagtccggagcgtaaatcttccaagctgaggaaactcagagaagttctcgatacaaatcaaattattgacctaatataaaacagaggtgattagaaaatgtagccctcagactttaatgccagagcgatggatccatatggtatctgagcagttcactgaggaagtttcaaggataacctgaacacggcaaacgacgacagctccattcttcacaaaaagaggtttcctctttgacttctttttttttatgtcaccttctttcctcctcttcaaatcaatttcttctatgagttcaacaatctcacattcctcaactacagagtggatatgcagcactgccttgtaaccagcagtaaaaattgcctagtacatcaaacatcacattcataagaaattcgaatacacaagaagtcagtccagagttaagacaccctggatttggaatttaaaaagaacaagaaggctcataagacccttgcaatattttttgtagtaattatattaatgctatctagatgttcaaatatcaaagaaacttcatctggtataaaccgttccgaacgggagtgattattgaattactaatatccatgtgacaataatttcaatctaaataattttggtttctgagctcccaaaacaaaattaaccaaataggagacataaactggagtttatttaccaaataatatcagtcagttaacctgatgcattgaccaaataattgtggcttactccaatgtatattgatcaatatactaaaatttgtaaacttgaatccactgtggaatatacagtatagaacatacacataatgcaggaaaatttgtaaaactattggtttcggaaaaaggaaatcatgtataatcatattgagccctatcagttgataaaataggatgaactaacagtctaaaaagatgtcttaacttataacagggctatgaagtaagaaatattttaaattctcatgttttatttttcacttaaaactataagccaaaaaatgccattccataaaagtacagtttttattttatttttttacaaattgtcaacatccaaaacaaaaatatctatatccatgtccaacacattcccaaattcatgctcgaaagaccagatcaccagttctagtattttatactttccttttccaaacatatgttttcgtaaataaactatgcaggacaaagaaaatcagctgtgattctatctaagagaagattgcaaactaagcaaggcactcctggcaaatcatagtaggccttgcaggaaccagcattcaaaccaaggtattgaacacagagaactaacaaatgtcaagtgagaatagtcaagcatgaaatatcctatgctatcgtctgtaagtgttacttacattgtcaagcaactccaatatctgtagttgagcacgaaattcagatatagcactaacaggattttctgcaagaacaacgttgccaagaatcagtatactgaaaaacaacttccagtgcttgaaaaatgtccaaggtaaacaaacacctagaccatagtcaccagttcatgaatagctaattatttcagaaagctcaacagtaaacatgtgcagaaaataatccacccagggactgtttgcaaaccagctcttttttttttctgagctaggctcaaaaaaggcacttcggtgggatagtaaaccactaaatttagccaggtttgagcagatccaaccagaaaaaaaaatctggtccagacacaagtttaaaattctccagaggcacatctcgtctgcacattggttaattaaacccttctacgtacatttgggtgaataaaaactgctatatcaccatgtaagaaaatgcaattttttataaataatgtaatcttccatggtaaaaacttagtaagaataaaataaatggtaaaatgaatgaagaatttcctctacttttctgcttcaggaaacaaacaaaaaggcatcatcaaagtatcaaacaaacaaaagaattcaaagacaaatggagcacggatagacaggatccctttcaacttgcaaaaatagtgatatatcctagaacctaaatgcatcacttttaactagagcaatatataatcaagtgttcagaatgcacaaagttcagccagaatcagtaccacttatcaaggagagtactaaagaaagcagcaccaacaaagtaattatcttgctgctcccgactacttggaaaagacacttactaatgcttgatagcacaaaaccagcagtgatgtcatcctcttcaattcctgacagtttgactcggacattctcaccaggtgcagcacttctcactctatcttcatcacagtgtacactaatgactttcacgttggcctgtgagcaaaatagaatgtgcaccaagatcagatttataattccagcaaaagctgatgcacttgctacttgaaaacatcaacaataaaagatgttaccttgtttggcataaccaacatgttatcaccctccgagatagttcctgattcaatttttcccatgaccactgtgcccatgtctttgtatttatcaatgattggcatcctgcatatatatgtgccttactgttattagttaaactatccatcataattattcaagtaagaaaatgcaatctgaacagaaaggaaataaaagtttttctcctaaagaaatgccatttcatcttatgaaaccaaggttcggtaagtaccacctgacatgaacaggggttttcttagtccatttaaattgtacttgacaagctaagaaacctggtcgtctaaccttactggaccttttggatctcgtaaagggacttgaatgcaatctagaacttcgaaaagacatggaccactccaccagctacaattgcttttatccattcttgtcttcatattagtccccaaaagaccagagattggcaagaagtggacatctgaaaagaatgccagaaaaagcaaggtaaaagtaatgtattgtggataattccatcattatcataaccacagatcatcacatcattgttattaccacactcagttgagcaagggctccattcaacaagtgctggatataatatatgacgctatgtcaacacccaaaagccaatctctaactagtaaccacacgaataccaaaaagcttattttgtttggacaaagaaaacatatgagtttcttttgattattatatgtaacatttgcaggacacaggaaacatcataaaaagcatatcatatactccaaatgtatccaaaaatagtgcttcgtgaataaactcccagcatttttagtataattagggctaaattaggaacaatcacaaagctaaacaatctaaaccaggaagtcaccaaataatgggaaggaaaactatggaatgttacttactaaactttttgcagatggcataataggcaacaataaagaataatattcctgtcttagaaggaaataaccatgtagatgaaagatgtcttaccatgcttagaaaaagaagatgtgaagcttcaactttgtgataagctaaggcatcaaagatttaacaagcaatgaagcaaaccacaacagaactgtctaataccccatcctatttgatcttttgatttctacaaaactagccaaatacccatgcgcttcaatgtctacaatgtgttccatagattctaaacttggaaaatgtatatatttttcatttgaacatcaatcactaaataattctattacaaatgacatgcgcaaagacataacttttcagagaagattcttggattaataaagcataggtgcagcgcggaccgtggatggtagactcatgaccaccactaacttctttcataatagaatagaaatttcaaattaaattgagaaaaatgaacagattttgtgaagagatatctccaacctaaaattaacgcatagagaaaagagtgaaagatgatcccattcataattatatacctttcttaacattgtaccctgatgatttaagaaaaggaaccatttttccttctatttcatcatatctgaaaccacataagtgaaataatgatttttctttacccaacatgcttatttaagaggaacaaattcttctcagtggatttgttatcaatgtatataccgttctttcgaccagccaacagtagattcatccatcttatttatgaccacaaccaacttagaaacacccaaagtttttgccagaagcacatgttcgcgagtctgcccgcctctttcatacccagtttcaaattcacctttccgagcagatatcacctgagggaaacaatgatacattcatattatatcccagcagaaaagacggtaaatatgatttcgaaagattgcgccactgcttacaagaacaccaatgtctgcttgagatgcaccgcttatcatgtttggaacataacttttgtggccctgtatgtcagaaatatattgaatacaacattatataaaagaacacagaaaccattataaaatggatcaaataatcatcagaaagtagcatgtcttgtaataaggtgtaatgacttggttagcaaaaacaccctgaattgttgctactttgctacacaaaggtgacactcaaaaatgagctgtacaagcatgaatgaagacatagtttcagtcaaacaaacagagcaacaaacacatacaatccctataaatcaatcctaagaccagtttgagacggacgtaaggtaccaaggcagttgttgcttccacatgaacgattccaattatttcaaaagggggaaaggaaatacatcaccattttatgtttaagtcttctgcttatctaagttttacgttcaagttatttaaatgtatgaaactatcttaaaatatgatagaatcacaacagttgctccataaagcaacacaaaatctgtttcaaaatattgaaatataaaactatgaccttgcattactatggtatatgtaaataagtacagtatatgaggcaaaaaaaaaatttaccggtgcatctaaaatggtaaatcttgtagtttctgtctcaaagtgtgctctcccaacttcaactgtcttcccctgaatagattcaaaataacacattgtaagtacaataagtgatatttgacagaattattcaagccacgacaaaaatcaaatttcatgaattagaagtatgatgacctagaagcaggattggagctggagtatccatagacaccatttaaactttgttggattcggaaatgtttggattttagttatgtaacaggcaggccatgaccattgatttgcatggttcatattactggtctatccaatgatccaagaaaaacaggtgcaatgatgttacccaataatccaaacccaaccatcagaatataagcaagcagatggcagcaaactcttgaaggcagtagagagatgaccacacaagtaatctcaagatatcacatgctcatcactgtcgaaacaggatgtgggagtggccatcaaggatcatcagtactggaactagaacaaaccttaggttccattttgatggataagtctttgtggtccttggtcatggttctttattttgcttttgggtagtttcacctttttcaggacagcatcactccttaagcatattttcagttgctaggacagctgcagttagtaggacagcagcagttagcatctcctttatatctcctttatgctttattaagtttggatgccctctaggacagcatcccattcaaattttgaattttagactaggagggtgcagcaataggcttgcagccagctatggctatatatatgtatccaacctccctcgggttggtatggctttgagtttgcgaatggaagaaaactagaaaaattgccccatcttgagtgccatcctcttatcaatgagagtaaccattgaaattctaacatctggtatcagagccacactttcctgtaggctaaacatctactgttccaccccttcccaagctcggttgagctctcagccagcagcagcagcagcaccggctgctcttccttcccctttcccttccccctctccacgcagcagccccccggaggcgcgccatgtccgatgttcggtctcggcgttcggtcgcctcgagcactcggcgtaagcaggacgccaagctcgccgcagcagaagagcacaggcgagcaacggctcagaccgctgcagcagcagcgagggcggccagactggcggcagtggagttggcagcagccagggcagaggcggaagcagaggcggcggaagatgcggcacgtgcggcggaggtagaggttgagaccttgcgcagcaacatcaacggctccatcggcgacatcaccgccgacagggagcttgaggagctagcaagagggagggcgcgggagcgggcagagcgtgctgcccacccccacggcggcggcggcccaagggaccgcgcgcccgccgatgggaacccagacgggcacgggtgtgccggcggcagcccggagcgcgcgcgcggcggcggcgctccgagtggaggtggctggttcgacagagagcgtggccctcgcaggcagcgcggctctccctcccctgaccggcgccatggccaccacggcgtccagacggtggtcagggactttggtcccggcggttggtggcctaccctcaccaaaaccaactatatcgagtgggccgcggtgatgagggtgaggctccaggtgcggcacatgtgggaggcagtccggtacggcgacgtcgactacgacgagaatcgacgggcgctggatgcccccatcgctgcagtcccgcccgagatgcagttctcgctttcccaaaagcggactgccaaggaggcctggcaagtccacactgcaggcactccgcaaggagtgggagaacctggctttcaagccaggtgaggatgttgatgactttgccctccgtcgcaacactcttttgcagaagatggtgcagtacggcgacaacctatgatgaggagagagccgtcgagaagctgttccgctgcgtcccagagaagtatgggcagatcgctcgctcgatcgagtctctgctggatctctccacgatgtcgatcaaggaggcgataggtcgcctcaaggtcatcgacggccatgagccacagcctctctcggggcctatcaccattggcgggaagctccatctcactcgggagcagtgggaggccagccaaggtgatgggaggaagggggagtcctcctcctccccgacgggcggtcgcaagtagcgcatggcatgcggaggtgtccagctgcggtgggcgcaaatacgtgccgagggtggcgcccgcagaggcgcccagggcggcgccgccggcaaccacaagccagcacgagacgacgcctaccgcaactgtggcaagcttggccattgggccaaagactgtcgacagccacgacgcggccagacccacatcgcataggtggaggaggaagagccggctctgctcttggcacacgcaagcatcgagctacctccggcggcaccggccgcaacggctttcctccaccttgattagctgaaggtactcgtctccctctgcaacggctccagcaacgacaaggctgatgggtggtacctcagacaccggcgcctcccatcacatgaccggccgacgggagttcttcatcgagtttgactccagcgtccgaggctccgtcaagtttggggacgcctccggcgtggagatcaagagcggtggctccgtcaccttcaccgccaagtccggtgagcacaggctgctcaccggagttcactacatccccgcgttgaggaactctatcatcagcgtaggacagctagatgagaacggctcacgcgtgctggtcgagcacggagtcatgaggatttgggatcgccgtcatcgccttcttgccaaggtaaacagaggcactaatcaactctacatcctcagcgcgcaggtcgcacaaccagtttgcctcgccgctcatcgggacgacgaggcgtggcagtggcacgagcgcttcgggcacctccactttgaggccctgaagtggctcagtgccaaggagatggtgcgaggcctgccgtgccttgaccacgtggagcagctctgcgatgtctgcgtggtaacgaagcagaggcggctcccctttccacagcagacgagcttccgagccaaggagcggctcaagcccgtgcacggggacttgtgtggtccagtgacaccggccacaccaggaggacgacgttacttcctgctgctcgtcgacgacctctcccgctacatgtgggcgatggtcctcggcagcaagggagaggctgcggacgccatcaggcgcgcgcaggctgctgcggaggccgagtgcggccgcaagctgcgcgtgctgcgcaccgacaacggcggcgaattcacggcagctgaattcgcgtcgtactgtgctgatgagggcattcagcgccactacaccgcgccgtacagcccgcggcagaacggcgtcatcgagcggcgcaaccagacggttgtggggatggctcgggctctcctcaagcaaagggggatgccggccatcttctggggagaggcagtggtgacggccgtctacatcctcaaccgttcgcctagcaaggcactcgacggcaggacactgtacgaggcttggcatgggcgcaagccggcggtctcccacctgcgggtcttcggctgcctcgcgttcgccaaggagcttggccacatcggcaagctcaacgacaggagcaccccaggggttttcatcggctacgcggagggctcgaagacctaccgcattctcgacccggagaaagcgtgtgcgcacggcgcgcgactagtgttcgacgaagggcgagggtgggcatgggacaaagcggacgatgcttcgactctgacgtacgacgacttcactgtcgagtatgtccacttcgagggagctgggggagtaggcagctcttcttcaccgagcatgtctaccccagcccccgagcctccactgactccggcagcgacacaccctcgagcaacgacttcaactacgacgagctcttcgccgacaccaccacagtcggcgaccccacgcactccagcaccaacagccactcctccgggcacgtccaccccgacgccagctcgtgttgagcacagcccggtggagttcgctactccgctctcccacgacgaagagcgcatcgacgcgtaccacgacggcgagctgctacagtaccgtacgatagaggaccttctcggcgaccagccagtgccgagactggtgcctcgcgacctagaggtgcagttgcaccttgcgtgcgacgacgatgagcctcggtctttcgcagaggccgagggacacgaggcatggcatgccacaatgcagtcggagatggacgcggttgaggagaaccacacctgggagcttgctgacctccctcgtggtcaccgcgcgatcacccttaagtaggtgttcaagctgaagagggatgaagccggagccatcgtcaagcacaaggctcgcttggtggctcatggttttgtgcagcaggaggggatcgacttcgacgatgccttcgctcccgtggcacggatggagtccgtgcgactccttgcgctggctgctcaggaaggctagtgcgtccatcacatggacgtcaagtcggcgcttctgaacggcgacttgaaagaggtctatgtgcaccagccgccggactttacgatccccggcaaggaggacaaggtgctacgcctgcacaaggccctctacggcttgcggcaggcaccgagagcgtggattgtcaagcaattttgctatatatttgtcgacaaattttcccccaaaaatttgacagatgtaattacagtacaaccgtagtgtaattacactgtaacttgaatgtaattacactgtaactataatataacttgtatgtaactttcaaaaatctctccataacatgttattttggtaaaatgaaggttgtgggaacaatttttttcacatatgtgtgtactgtgatttttttcttcctcaccaaaacaaatctttataatagatctaatgatttaaaattacgtgaaacttacattcaagttacactgtagttacatgaagttacagtgtaattacatacaagttacagcgtaattacactacgattgtactgtaattacatctatcaaatttttaggagaaaatttgtcgacaaatgtataggtggtcccttgtcaagttggattccacgctcaaggggatgggctttgagcaaagcccgcacgaggcggccatctaccagcggggcaatggaagaaatgccttgctggtgggtgtctatgtcgacgacttgatgatcaccggcaccaaggatgcagaggtggcggcgttcaaggaggagatgaaggccaccttccagatgagtgatctggggcccctctccttctacctggggatcgaggtgcaccaggacgactccgggatcacgcttcgacagaccgcctacgccaagcgcgtcgttgagctggttgggctcaccgattgcaatccagctctcactccgatggaggagactgaagctgagccgcgacagtccgacggaggaggtggatgccacacagtcttgtggggagccttcgctacctcacccacacacggccggacttggccttctccgttggctacatcagtcggttcatgcagcgaccgacgacggagcaccagcaggctgtgaggaggatcatccgctacgttgcggggactctcgaccacggtctctactacccgaggtgtcctatcaaggcacacttcgtcgggtacagcgacagcgaccacgccggcgacatcgacgccagcaagagcacgagtgggattctcttcttcctcagcgactgcctcgttagctgacagtcggtcaagcagcaggtggtggccctatctagctgcgaggccgagtacatggcagcctccgccgctttgacccaggtgctctggcttgctcgactgcttagtgatctcctcggcagagactggagcggtggagctcagggtggatagcaagtccgccctagccctggcaaagaaccccgttttccacgaacgaagcaagcacatccgggtgaggtaccacttcatccgaagctacttggaagaagggagcatcaaggcgagctacatcaacaccaagaaccagcttgcggacttgctcaccaagcctctcgggagaatcaagttcctcgagctctgctccaggatcgggatggcccaacttccccacaagacgacgcacaagacttagggggagaatgatggataagtctttgtggtccttggtcgtggttcttttttttgcttttgggtagtttcacctttttcaggacagcatctactcctttagcatattttcagttgctaggacagctgcggttagtaggacagcagcagttagcatctcctttatgcctcctttatgttttattcagtttggatgctctctaggacagcatcccattcaaatttcgaactttagactaggagggtgcagcaataggcttgcagccagctatggctatatatatgtatccaacctccctcgggttggtatggctttgagtttgtgaatggaagaaaactagaaaaattgtcccatcttgagtgccatcctcttatcaatgagagtaaccattgaaattctaacacatttccctataggtacatcctgttgctgtggacttgttacaacagcagttaaagaaagggttcatgccagcagcatggttacatcgttgacagaagttatcaatgaaaacagtgaactcctgtgctgcccatcagctccaaattatgtaatgcagcactgaggctccacttttctattgggaacgagtcaagaagctctatgtcattaactacaaattgatattcaattgactgtagattgtttatgtcatggatatggatggacatggattccaccactaaagttggattagacatcttgaatattttattagcatatatgttgaacatctctagtctggatagtggatacaatatccatcccattcctgccactaattagacggtttgcagaataatccttactaagaattttcacccgagttccaagcgtacaaagcctaatgtaggaagcaacatatttttgccataaatgaaaaacataaggatggctagagcatattcccaaggatgatacctttgcccgttcttcctcatttgtatccataatgtatgccatgtacctgtggtattcatgtatatgaatgagaatctcaccaacatgtgataaaagtatcactttcatgcccaaaaatgtaatcaaaatcatttgtgccgtataagcgttagaaaggtctaaaaggtgtaatcaacatgtgataacaataacaataataaacatgtcattttggacatgtccaaagtcaaactttaaacatgtatatctttttacatatttcggtgaattgtataaagtcatgtgtaagtttgttatggaaaatgttctcatgaggttaaaatattgttgagttttttataaatattgtaatatactccctccgtcccaaaatatagaaatttctggctatggatctggacaagaaatgtttatattttgggacagagggataagtagtcaatgtttcctttcaaagaccatgtcaatgcctaaaacaagaagtttttgtgaccagagggggtaactctttaaccacataagctgccaattatgccatataagcactacaaagatgggttaaccacagaaaaccccataccctaccacattttagaacctttaagctgagtgaaaagcatcaaccaaaatgcaaaccaaagaggaaattgcaaattcaaatctatgcagaacatagaacaaattaaacatgtcagttacaacaaagctttagcctgcccatttatctagagcaaagtcaatgtgcatatggaccttatacagaaagaatttgtggatgaaagaagggatggaaaatagaaagggataaattcaccaagacctcctgtacacggctggggagattgctctaaaggttatttttaatggactcactttggtttcactaaagtttctgagcagcaggaacatatttggtcaagtggcatacaaatagtctctactacagaaatatgttaactattttcttctttatttgatttaaatatggatctaacttacaaaacaagattctatgaggcattaaacgagggaactaattaccagctctctcgacttttgtcctttgcttctttttcatacttctggattgtcctgtcatccacttgcccacttaagaacaatatctggcctccagctgtggacttaccagcatctggaaccatgaataaccaatagaaataggtgaggtcatagaagcttttagcaaaatatcagattgccataacatcttatgcgacaataagacataagcatatgcttgtagcatatgtacatcaaatctatctaaatatactaattacatactacctggaaattcctgtgttttggtaaagaagtaaataaatctagtcatccatctggtcataccaagctataattaatggctatgatcatttgtctagacatatatgtttaattgtgaaggataagctattgtaatttccactaaaaaggtattgtaacatgagaagtaaacaaaaagtaaggactcttctactgtgtaatgtaattttatctttaataacatacccgtaattgcgtctcattggctaatgatgaaagaaaatccagaagcaagctgctaataaaaaattctggtagcaatggatgacaatctcgcaccagttataacggtgttcagccaccagatcttaaacctcaacatttagacaagttctacaagtggcctctctccatttattcatctaggtttcagacacatatattcttctgcacatgcacctatacacgtcacaaatataaatgtgtgttgtgttaacaattgggattgaccaggttgggcacaagtaatctccttggctctcaccacttgattactagcccatctagtggcaaactggtttttatgttgttgttttgctatctataacatagaccttctagtccagttttacatccaacacaaatataaaattgaccattattagttatctgtttcttaaagttatttatgaaatcatgttttaaataaagtttaacattataccattcagcacagtttctttctctgaataatctgctactctggtgtatgcaaaggataaagaaaaattaatcaaacagtagagacaatgcaatgtatctgagggatagatgctatttgtttttatgttatttaaactatgagtaattaacttctaaaagcaccctcagtgaaagatgtatttatttttgtgatttgacagtaagatgacaaaagaacatgaccctcaaatataaccaggtactcttaatgatggtcatatcctatgcatgtatcaaccctagagatctttaatttaacaaattataattttgatagacgtgcatatatcattatgtaaagtaaccactgcaaattcgtgggttaatgattagtggtaacatttgactaaataaaatgaccatcaacaattgaataaatgatgcaacagtataactaagtctataaaggaaaattaagatcagaaaatgaggaagaccagatcaaacatgcacgaatatgtaagcgccgtctagacccttatattacaaataaaaataaaaaacatgcctatggagaatttaataattaatggtcaatgtaaaattgaccaaatgtacgaaaactgtagctacttaggaacagagcaaataggcagcatcatactacagcaagggcacaatggtacaatgggcctgttcactttgatgccaaaaaaaaccttaccaaattttggtaaaattaccaaaaaagtggctacatttagtttgctgccaaattttggtaactatataagaaatcctgccaaaattttggcaactatacattgccaaaatttggtaaggtttttttggcatcaaagtgaacaggcccaatatattctacaacaagcgcacagtgcgcctaatgggtttattcagcaagtcagcatagtttgtttcttcaaaaagaaaaggactcaggataacttggtctagtaccaaaaagattactgcaaaacagttaggcaagtactcccctaacacaccaattagccccattcaatcagtccttaatgttaatctatgttaagcaagaactgaaaaatgcaattttctaatactacaaaaatacactactatcagaaggcaaagcacaccatttttgctctatggcttttgtcctacaaaattacgtcacaaaagcaaataattgctggtaagattgataagaccaacattctaccacaataccaaatcaaggatgtaaattgtaagaagactccagaacacttttcattctgcaatggacattcaagtcacagtggacctatgtattaaactagacaaaaggatgcaaaaatttacaggagcactcaccaacatggccaataaaaacaacattcaaatgccgttttctattctgttcctcctttgcttctgtttgaactgcatcatgtggcaaatctaaaacaaggtgagaaagggccttaagatccaacacattgtcattaaattgcaattatacaggatttcagaaagctccacgaaaacaaaatgtagatatcattgctttttcaattttaagttcttgcataacatagattagcataaggaataagaacaccatccggacgggttccaaataaaagcaatttaatagagaaacttcagacaccacataaagatgacttacaaatttttgaatgggtttccaaaaaaaaaaaaagcaatctgatagagaaacttcagacaccacatgaacatgaattacggattttctcaagagcgcaaattagtgaagggatgaaattctcgaacaattctgattcttctgaatgatcataaccacgatgtatagttcaaaagaaagaaagatttccgcctttcacacatacctactgactgcaattccagtgactgaagacttgacttgattccattgacatctgagagtataatgtagctaacattagaagactcattgtctaaaaaaaagctaacattagaagactatgaataaggagtataatgtagctaacattagaagactcattgtctaaaaaaagctaacattagaagactatgaataagtaataggtaggtaactcgcgattgcataactacataaggtgggacaaacaaattattgattaaaaagagcattcaaagccaactacataaggtgggcaaacaaattattgattaaaaagagcattcaaagcctacatgggttacctgattataaactataaacagaggaatcaatgtaagatcgtaacaaccaaaatgagaatggctccaaagtagaaaaagggaccacacaccatctgattacttgtttacattaccaccagcatctgacatcattagcagcattcacgtgatggcccataagactaaatagaaatttctatcaagcataacataactttcacattctcttgtgctacaaattttagttgaagaataatttcaaatgtgctttattcatagttttgggagtaacatgggtttggcaacataactgttcaaaattacaatgacggtaggaagtccatacccacatattactgaaacagaagggctacgcttgacgcattaagacctagtctgatcatatttcttaccttaactaatgaaataatagaagtacaaataaaacgacatcgattacaaaactacccaactctacccagatcatcagaacccatgaaatacaccatttcacctccccacccgaaccgcagcggcagcagcccaaacaatggaagaaacaccctccgaagtccgaacccacacattacagcataattaggcacagcctagtaggctaccgcataattagacacagatgcgatccgcaccaggcgagctccgatcgaacggaaggatccagcaggcacgcgagggggcaaacggagcagaagaggaatcgagacggagaggcatggtaccttgggccgcacgggctcggggcgcctctcgggcgtcgtcgtcatcgcgagccgcggaatgcggatggggcttcgctggagcctcctcgaggtcgtcgcgggccgcccagtcgtcgtcggcgggttggagggaggtgatcgccggcgccggcgcgggcgcagggtcggcgtcgtgctccatctcccgcgagcacgaggaggaggaggaagcggtgggggttgggttgtttctgcccttcgcctttgtgcccacttggggtttttcttggcttagcggaaaatttccgctcttttcgctgttttagggtttttcagttatttttcgtagggggattttggcctggggaaatggggaggagtggggggctacggcggcaggccgagaacggtggagagggcaatacacgagatggtgctgctttggcgacttgcggccccgatcttttcccaaacaaaatttttacagattgttatatcgaattttttgacacattaagtattaaatatagaaaaaacaattacatagttcgttagaaaatcgtgagacgaatcttttaagcctaattgcgctatgatttgataatatggtgctatagtaaatatttgctaatgacggattaattagacttaataaattcgtctcgtagctttctggcggaatctgtaatattttaaatatgtgtccgtatatctaatgtgacatgcaggggcaaaaaaattttccaactaaacaggccctgcttatcagccaaaatttgaattttcaacattaaatttggagttgatttggggtttttcatcgaagttctaagaacacgtatataaaaattttatttacaaattctttttcgtttgcaaatatgcagtttcacatataagcgaaacgttgaggcctttggcgtgctcccgtgcctcggcccgcaaggcggatcggcctaaccgagtaataactgggcttctgggtttggcctttcggtgtctggtcagggttgaacgtggtatttatgttgactagtaatcatgcaatgcagatgcaatatgaggaaatcaatgcttgcatggtaatgctcatacatcttgacacagtaaatttagatatattccaagttcatgatcagaagataatatggattttataagacagtatgaacttgtaaagagtaagatcggtccttaattagacggtacagtgtagaatatttcttgcacacattgcaaagacaaagtcagttagaacttagaaaccttgcatccgattgtctttatatggcgaatttgtaaagtttcagtacttgctccataagaattcataacaattagctcagatgaaaaaaaaaacattgaatgccatgcacaataggatgcctcctcttgtaaagaaggaaaaaaacgaacgcctattaggcatgtacaaaggaccaaggcaaaaaaaaaaatagctagtcatatatagtacatatggttatttctgagaaaaatacttttccacatattgggggttatcttgtgatgtaaccacagggagaggagaggaactttgtttgctagatagatgaatatttctgaaacaattctgtctcctggaatgcatagaattttgatcttgcagaagtcttcttaaccggctctggttgctttggtgcacatataagagcatcttcaacagcctttccaaatattcatatagctaactctctatctgatttggctagtcaaactagctacttgctccaaccgcctctccatctaccacccctattataagtctatgacaaatagaacccacgtgtcagcctcacttcctcttcctcttccccttctcctcctcctgtgtgcatcctggcttcctttcctccacccacgatgccaaccaccaatccgccgcttccatgccctccccttcctccctcacattcgattagcttcaccgccgcgcccaatcgccccgacgtgctgctccaggccaccgattccgtccccgtccaacgccatggcgccaggagaacgacgacggcggcactgggtggatggcgcggcaggtagggatggggaaaaagggagagagaggagaaagggtgtaggacccacaccgatggcaagccatatcggctggctaactttggctagtctggtggggactttagccagctggatgtcttggagaagcatttgactagtctgttggagtagaatttttgtctaagttagccaaattttggcttggagaaccatttggctaggctcttggagatgctctaatgcatggtcattttttactcttgctgagttgatctggagtgtttatgttgtttctgagtataatgttaaaacagagggagcatattgggaaggctatttgactagggctgtgtttagttcacgcaaaaaattggaagtttggttgaaattggaacgatgtgatggaaaagttggaagtttatgtgtgtagaaaagttttgatgtaatggaaaagttggaagtttgaagaaaaactttgaaactaaacatggcctagatagcattggatgttttggtttccgaagttccttaaggaaccacatcaggcaaattagaattttactgaccagcactgatgtatttttcggacgtgataaccagctaccactccatctatgatagacactattcatctatacttcaaatacgattttctcttaaactactcatccgatctacgatccgattacaccgttgtgttcgtaacaattaaatctttataacaagatctcacatgattatactttaatgaaaaaaatataaattacttttataacatatctaaattacttttagatttcactaagttacttattagacatataaaagtaattcaataaagcctaaaaataatttacatatactctagaagtaacttataacaaaaagaaagtaacttctataatatatattaattactttaaaactttattgaatttacttttatatgtcgaagaagtaacttagtgaaatctttcactaaaagtaatttagatatattataaaaatagtttgtgattttttatcaaaatataatcatgtgagatcttgttgtaaagatttaattgttacgaacacaacggtgtaatcggatcgtagatcggatgagtagtttaagagaaaattgcatttgaagcatagatagtaggaatattttttctatttgcttgatcaattagtactatagtaaagtaatattcttcaagacacatatatggacaatggctgatagcgtcgctcgttatgactaaatcgagatcgctctcgatgtagattttgcgtttctggacggctggatttctggttgtcacgctagttgagtttctgctcattatctaatctaaatatagtaattatgtagaaagtctgttatctttgatgggaggtcgtgtccgtccacaatatgagcaagattaatcggtttctgtaactgaaacaagcctgcacaactctagctcactactagaaaaactatttttcccaacgtgagggttttattttcacaggcggatatgacccttagagtcaaatgaccgcctacaaaaatataaatcggggtgaaatttaatgcccaggcggaccatttaagcggcgaatgcgaaaataaacttgaatataaataggcttgcgggccctaatttttttctaagtccttacacctctcagtcctcccctcgctccacacctctcctctcttcctcaccggcctctcccctcccctcccctcccctctcctcctctcccctcccctcacttctactctccctagcggcggctcccggcggcggcggcgggcggtgacggtggagggcggcagtggcgaggaggcgcggccgaagtccgggaggcggcagcggctcccccctccctcccagatctagccggaggagggaggggggaggctggtggcggcagcaacggcgtggagcggccgcagcgtggtccgggcggctcccctcccccctccctctcagatctggccgaaggagggagggggaggccagcgggggcaacggcggcggctcccctcccccctccctctcagatctggccggaggagggagaggggaggctggtggcggcagcaacggcgtggagcggccgcagcgtggtccgggcggctcccctcccccctccctctcagatctggccggaggagggagggggaggccagtgggggcgacggcggcgacgacggcacggggtggccggcggcgtctccccttcctccctccctcgcagatctggccggaggagggaggggggaggccagcgggggcggcggcggcgacgaaggcacggggcgacgacggcatggagcggcggcggctcctctcccctcttagatccggccgggggagggcggtggcggtgacgacgacgactgcggcggttcccctcccctctcagatccggccgggggagggcggtggcggcgagccgcgtgcagcgattttttttgttcgttttttttttttttgcattttcacaggtgggccgttgccccgactgtcgttgtgatgcaggcggatctccctcccgcctgcgaagattagttttggctgcctgtgaagattagttttctagtagagtggctggccgggctagctactgctgaaacattaaactaaacaaagaaaaaggaaaatattgcttatatcttcctcgaactggtagatgactggagcatcttagtgtaattctcacatagtagtcagggctacataatccggcttaagtaggttttatacccatataaaaatatgaatatgatcacgcatatcccggatataataatgccctgcaagaatatagagaagagtcagtatagttggtaattaatcatctcattttggactattctaagagcatgtgcgcgcatggtgtctaataacggacgctttctattgccctgcaaataaatttggtgatgtggaagagagagagggaaaaggaaagcaaaatgtctaaacgtttattaacggaaattttgtttcataagggtggattaaaggaaagaaggataataaaaattatttagtgcattaatggttaagaggttttgttgtctctattattgtagcatgatagtatctagtgctacaaagagctcgtattagactctacctttatatatgcctaaaaaactaatttctcaacaaaaccaatcattagaaaaaaccgaacaacttactggattcaaatcctctcagtaaactgaattaaaaaaaaagttacaacgcaccggcctgtaactaacacctagggaaaaagaaaatatggaaacacttgcatacgtacccataagcaattaatcgccggctgccgccaatcgtcgacgtcgcctccatcatcacccacaaaatcgtcgtcgatgcttttcgtcggcgctcgcgggaggagaagaggagccgcgggatcgtcggcgtcggcgtccttgcccttgatgatgcgtatggtgatgtaggtctcccctggacgcagatcccgcgagcggctaggcggtggcgagtcgtcgtccgacgaattttttttatttttaattttttttattaaaagttttaaaaaataatttttcattttgaaaattgacagaagtggtcgcctaccgccctctgggagggcgatttttaaaaatcaccctcccagagggcggcgaaagtgacgtggcagacggtcgttcgctctcgggcgacggccgtcaacgaaatttgcaggcggcccccttgccaccctccgctagggcgattttgtactgtgcggggggccgcctacaaatgggcggcggggggcctggaattttgcaggcggcccccttgccgccctgggggagggcgattttatactgtgctttatattttttataaatatcaatagttatcaaatttttttatattgaaaactatacaagattaaaatctccaagactggtaaaatacaattttattattttttagggcctatttggaatgttaccgtacaaatattttgttagtgccaaaatataagcaagttttggcactaccaaatatttggtaaggtaaaattgcattcgatcatatttggtttgctgccaaaatgtaaaattgtagtgaagaatgttctacataatctcaaatctagattacgtattaccaatgaataggcttcaatcgaaatcaaacacaagtactattcaaattaccaaaatattggtagggcatgtttttggtagcaatccaaataggcccttagtcttacgcatacaaaaaaatcaccaccataattaaacattgtaataataagatagataagaagtgccatcgatacacggtacaaatttgtcgatcccgacgaatcaagcatgcggtaacctatcggccccttctaggtcggtcagaatgcattgcattctcgtggtccttcaatcgttgatactctacttgtgtttctgactctgttatcttctggccatgatatgatggagtgacattgtcgatccatcgagtaaatccacccatccttggattgcatcttcggtttgcattgaaatatttatatctttctcttgtaccgacacaaatataacgaggggccatgaccgttcaaaagccatttccacataccgtctccaagcagcagtgctgtccatcggcattagttcccaaaaataaccttctgttgcacgactcactacaactgatactgacattgtgtagacttcttggtctattctaaatcctctcaacaaccaactataaattgactgaaatgttttctccgcaggcctatcgatacccttagatgtcattacaaaatctgacagatcaacaccatctggaccaaatctaatatttccttcaccgtgaactatctgaaatgtgaccttatttgacattgtgcctgatgaaaacaataactgcgttaacctcgcatttctgtactacgccctaagttacattctctacaatattgttctccaaaattctaaaagtaggttacattctccagatcaaactaaactacatcttacaattaacactactgtctatgtctcaattcatactattatattctatgctctggatctacacatatgtgctgtgtgctacagatatgctaaaatatatggaactaaaactaaaacgcaacatatatactcaaacataacatattagtacaaatgcaaaagatgtatgggagcaaacctgtgatgaagtgagcgaaccagcagggcttcgccgctccccttctgctgccctctcctctctctctttcgttttttttggatttttagtgaatataatgaaatttcagagaggggggactgggctttatagggggaggcaaaaatcgccctcccccagggcggcaagggggccacctgcaaaattccatgccccctcgccgcccatttgcaggcggccccccgcacagtacaaaatcgccctagcggagggcggcaagggggccgcctgcaaaattccatgccccctcgccgctcatttgcaggcggccccccgcacagtacaaaatcgccctagcggagggcggcaagggggccgcctgcaaatttcgttgacggccgtcgcccgagagcgaacggccgtctgccacgtcattttcgccgccctctgggatggcgatttttaaaaatcgccctcccagagagcggtaggcgactacttccgtcaattttcaaaatggaaaattatttttgtaaaacttttaataaaaaaaattaaaaataaaaaaaattcgtcgtccgacgaagaggagtcgtagtaattccagcggcccgacctaacggcaaacatggctgcagatttagacggaaaaagcttgctcacaatgtgtatatattgatataacgtacgtactactactactgtgtagcgcccgctcgttggagacgaggatcgctgtgaaataattggaatacatagctaaaatatgctccccacccctaatcagatcaggtttgggttccgtggagcagagtttggatcggatccgtgcggacggctgtagttatagggcggtaataaagtcgaggtcgcaattgacgacgatgagctcgcgtcgtgtcgatgtgccgcccgtgccaggttcctcgttgggcttggcggtggtgaccgcgcgcggcgggctttggtacgtgtggtgagggtctggtaagcggaagcatgggccgatcgatggttggcattgctggctaactgggctgttcggccttgcccttgctgggcctggtcagcgtggctaggctaggtgactggatagacctggccggcgtggtgctggctcggcctaatctagctggctggtttgagcatggccgactgggctagcccggcaggtttccggttctgaagaacttactttgggaataagttcacttgccttccctcaactttacattaagtttgttcggcataccttaccctcaatactatatatcttcaaccctaaactatacaaaaccgtgcaatttagttcctatggcagaattagcagctggtttcgttgacgtggtatcctagtcagcgaaagaaaataaataacatacgggtcccatatgtaagtgagaagaaagaaaaaaaatatatgtggggcccaacgtgtcaacgcttctcttttttacccaccacgcatgcgaggtcaacatctggggaggcagcagcggctggggcggctaggaggtggtggtgacaaggcggcttcgactaggggcgacaaggaggtggtgatggctaggggtggtgaggaggtgacggcggcgctacaccggctgtggggtagcgatgaggcgagctcagctgggggcagccggtctgtgcggtggcgaggcaacaccgcgctcagggtgttcgccggtcatcctcttgttgcccaagcacctcgctcgcgtttcatctcctcttcgttgacattggcgagccagagccacgacagcgtcggcagcagcgcagggtggggtagaggatgtagcctcaaatccgggtcgacgtcgtgaacctcgaagggagaggaggggagaggcggtcggccacgccggcgagagagggggaagagtaggccaacgaacctaggagggagaggggggagaggcagctgaccgtgcgtggtggagagggggaggaggccgatgaacctgggatggagaggggaagagaggtggtcggcatccatttcacgcccagaaatttagccctaaatttccagactattttgtgtattaaatccctgtccaggaccagccagggtacacaaaatgacaagtaatatacagttccaaacgtaaataaagcgtaaaatacttacagaagaggcacttagtcctcacaccgaaacaaaagccgcagcagcggaaaaaggcgatcctagcggggcttcagctccactccacaggcaaaactcaactggggtctgagccttggtcctctaactccgtcttcagctcagaagcactacacttctgaaaagggggaataatagtaaggctgagtacaaccaccgtactcagcaagccacaccaatgatgcagacgtgcacggggacacaaagaggggtttgtggctatttgcgtaaaggcagttgtaaaacattttattgagcaaaatagtaaaacaattgagtaattaaggtaagattaaatctccactgatcaacgctaaaccacgttgaacaggcccaaccaacccacctgaactacagtgcattaagtcgatttattaggggtgagactaatcacggtgaatctggtcgatcgcccataaccgcgggcacggctattcgaatagttttactctggccagaggtgcacaactgtacccacaagacacaatccaccggcatgtcacagtgtcatcatgtgcccatgatgaacacgtcaccacgtcgagtgattgtgacaagactcttcatataactctcccctaaccatccacaccacgctaaggtttcacccccaccccctaccctagaggtgggcagtcccctcgtgcgctgcggtgaatccggcagctggacaaccggacaccccggccgacccaactccatcacgcccaccctcgccacggtgcctaggaaagggtcgagctatacttcaagtcaagcagttacccactcccgcttgtggtaagtattgtaagtcttccagggtttcccgtgaaccggtccttaattaccatgggtgcgaccagcaaaaccatgcacccacagcccaccattcagtcgcattttagttggataattacgaccatgaaacatggtcaaatgtctcgagcacgcagctcgtcaagatactaagatgtctaatattgtaattatcacatcaactgagctagtggcaattaagcatggctaagcatatagttctagctgtgtcacataagtaacatgagctagtcgatttatcacccaaggttgacaaaggacagatatcaagtaaacatggcacaagcgagcagataggtaaatcccgatcccatgtaattagcaaaacatgcatatttatttgcaaaaggtaaaacatttgtaaagtaggatcaaaatgctcaagggaaatgtgtgacttgccttgcttcttcaaacgatcttcagaactcttttcctcgcgaccgcggacttccgaaacgatggattatacacgctggcacgcaaaacgaggaaaaactctaataaaaaccaaggaaatagtacataaaaagtaaacaaacatgtagagctcaattttagatgaattttgcaagttgaatagctcaattcggagttcggataaattagatatgaattttagaagttttgagccaccttaatggatttatagaattattaatgatttattgcgcaattaataatggtttatgacgtcaccgaggggaataggttgcgccgacaagtgggccccacctgtcggtggctcaaaggaggtcggcgcacggtggactcagtccacgcgcgcgctgcccgcgggcgcaccacgtggggggccgcggtggacggggaggacgaggtggcgccgacgtggcgccacagggcagcgacgccaggcggcacgaggagagccacgtggacggcccatatcgccccgaagggggatggggtggccacgggcgagcgggagccggctcaccgaccggccggacggggagccacggcgcatggcccgatgatcgccggcaacgaccaccggcgcgacggcatgtgcgggaggcggcagaaagaggggaaagggagaggagatggagggggtcctcaccgaggggcgccggtgacggaaggacgacggaaggcggctggcggagctcgggcggagggaggcggcgctgctccggcgatgggcggcgcttgggaagaaactgacgagggtggccgcgacctgcggaaggggaaggagggattaaggaggggaggaccagagcggtgcagccaaaacaatggccggcagcgacagtactaggtggagctcaccttgagtgatggggatggggtttcggtgacgattcacggaggatgagcggtggccgggcttgcccttgggacggcgaagccggtggaggtggttgcgcggcacggcgatggctaggacggcagtggtggtcggctggagacggtagaggcggcggtggctcggttttgcagtagggcggcgtttgtgcggtggtttcgagggggagagcagcggccggggtggggcttgatgcagcgaagccgccggcgcaagcggcgaggtgcggcgtcaactagcgcggcgacagcggccggctgaaggttgccggcgagcggcggcgatggggagcggcgtggggagagcgggagaaggcgagggaagcgccgacgaggaggggaaacgagagaagggagcccgaggatggattttataggctcggggagggaaaaacgttgccgggcgtggcggatttggggcggcaatgaccagcgacgtgggtgacatcatgggcgaagtggagctcgatcccggcacgatttttgggggaaacgtggggagagtgtagaggaggtggatgggaaccgatttcatgcggtttgggcgtgagggcgtgagcgggaggagccggaatcggcggcgatgtgggcggcatggcggcttcggcggtttggatgagggaggctggaggtagaggaagggtctgacaagcgggtcccgcagccccacttgtcggcctgaggggagggaggaggcgcgcagggaggcaaagcagacttggggaggggaggcgcgctgggccggcggcccgaggagagtagggaggagggggcggccagccttagagagagggagggcgcccaggccgcggggaggcaaaggagacggcccaagggaaagaaggggaatttaaattggttttctttttattttaattgataaaatgaactttgtgactttaaaattacttcttgagctccgaaaattcgcggaaaaatccagaaagtattttagggtacaaagaatattacaaaatgtttccggccaataatttttaagggaaaattttaatttcccctataatttcacttgattaaattgcttaaatttttatttaatttctgggaaatgcattattaagtgatttttaatcccgaacgaaaatcggggcattacaatccagcagttgctcctccatccagtcccccgtcggtccttctccgctcagccccccgccgctccttcctcaccagcgttgcctgtgtgcatcatcggtgtcgtcgagccggtggagctcagccggccgcctccccccggcgccagcgacctcccgagaagagaagagaagaaaggaaaaaaaagagaaaagagaagaaagaagagatttgggtcccacatttttctcacttacctgtaggtgtcatattttatttatttatttatttgctgactaggatgccacgtcagcgaaaccatagatatatactgctatgggatctaaattgtgcggttttgtatagtttagtggtgaagattttttgtattggggattattgacgtcatataaactcgacgtaaagttgagggacagctgttgaacttattcatacttctactttggaagaagagattttgcgagtttttttttatttcggttgctctctgcctctgtagctatctcatagtatacagagtaaattgcctctggaaaactactcaaaattcatggatacaattaataaacaaaccaacattgaataactaaacgatgatggtacgtttatatgtcaacagcatacgatgaaatgaaatgcgatacggtgtcataattgcatgggcatctggccaattttcaagccataatagtactatataaattgatgccctatttggtgggtatcttttctttctataaagttaaggccaaaatctcaaacctcatgcttctacgtcatcatcaaattgtgaaccgttggatgaatgtattaggatgaatgtattagattgcttctcaaacgttggagggaatgcagcatagagcctaacccatcagtcaccggatgagtctcttcgcctacttagtgccaaatatagcccacatgaacacattggcccatctccacacacatctacatgtatccagcccgtcaatccgtataaaatagttttatggctgaacgctccttcagttgacatgtgctacctaaattatctacaaattttggatagggctgctaaaaagaatttcttcaagaaagctatttgtttcttttgtttcttcttgagattgtacctcctatctaacaaattaatattaaccaagtcccacaacaacgcgaggagccctctagtattatatatatgtgcgttctgaagaaccaccaaaacgaacacgatccttcacccggtcacccctactggccaacgtgttgttatagacgctacttcctctgtcacatatcaaattcatttgtagctctttccatttatctcaaaataaatagttcatatttagaaaattattgcgttggaatagttatattggaagaagataaagtatgagtattggtatacttcctccgtacttataaaggaagttattttagacaatgtttaagtcaaaccttaggaatataaatcaataataactcttaagttgttgagtttgaaaatataaaaattatattaatagatttgtcttgaaaagtactttcataaaagtatacatgtatcacttttcaataaatatttttatagaaataagaaatcaaagttgtgttttagagatcgtgtcgctgttttaaatgactttttttacgagtacggagggagtatgtgggatggatggaaaaaaacttattttgagatggatgtactattaacatgagttagtttcaactatatttagaatatgtcacgacttaatgatgatgggatggcaacattgtcaaccagctttaattactccttaatctcttatgctcctagtcttgcatacctggtgacggtggtgagccatgcgggaacgacgaactatcgtataaaactttgttgatttcttagccccacatgttatagaccccatcaaaaataaaatttggtaatagaatattataaaagttttcatctttacaaaataatgataaatttattataatgataatatatttgagaaaaaaaccgttgcaaatcacggagattatgctagtgtttaaatagcaaatctggtaggcctgcctgaagccatgctgactaggagcctgctagtgacaggctggctggcaaccactttggatgcattaaatcgaccatgagcaaataatagagaagttgctcacaaaataagcaaaaaaaaaaaaccaatacctgtatttatctcagagcgatggcactcatggaataattaattttggtaattttattttctaatccttttagtacttcaattttatgaacatagaccgttgaaaatctttacatatctatattagtccccactaccaactccttatttttcttaaaaaaaagaagttaaaatgacatggatccacatatcaactacttccaccaccaactcccaactttgtgagaagaaaaaaaaataatgcgagacattaacaaatatatgctgaaatcaaggtatgctatatacatagaaaataatgataacaatgggctatataataattttttaattaaaatctcatcccaacgtataggtaatatgcaagtaatctaaatactactacaaaactaaagttagtgctgagttcatgcagtaaaaactgcaaagctttactctgctcatgcctcattgcctgctcaagctttctgtcgttgtgacctgttctcgcttcagctttttttttttttttttgcaaacacattaattgatttataattaagagtactacagacagagctgaagggaaatatcatccgcagtacattgccagaaaagataaaatatatacaacaaaaccatccattcagacataaagccaattgaactaagaaaaactttctccaagataatccaaacaacagtaatggacgagatcgacaagggactgtggcattgccgcgacgactacgtccacgagcctctactaaagacatgcacaccgctcttcggctgcctccacggaagtgacactcttcgagatttgttgttgagttgtagattttgcttaaacttcaccagactcaacaaaggatcgccaaggagttctccatcaaatctgaggagcactgaccggtctgtactcaacccgaatggaatcctcaacttaattggatactgctgcaaggagaaccggaaaaagtcttcacaccccagctcgtctgaggacgctgattgtcaacattttgtcaaatgaagaagaagaagaagaagaagaagaagaagaagaagaagaagaagaagagaagattggaatgagggagaagaaaggtgaaataataggggcagcatcaaccatatgaacatatatattacattggttactgcaaaactaatttggtgatattatcaaagacaaaaaaacttggtgtcaaaagagcaagtgcagacaaattcggtcctacatcatcaaaatttcctagtttattaaccagtgggccaatgctgtcttatcaattattgtcagaactaaaaaaaatagatttggaaacaagttccaggatgatttacttttaaaacatcaataaggccagctagtgcagaaggttctttgggggaagcgctacacaaaacgacatccattcatattatttttaataattgcattagatcctagcgtttagttcgagagtttctagccaaaaaatattaactccatatctttaactactttgggcactccaaaattgatagaaagttgggagagttctttttcctcaacgatagaggcttgttttcatgctagcatcttttgaatatataacaaaacaagagatcacttgaaagaacattcctataccgtctattatatttcatttctaactcccgcacttcatattgggaaaagtaaagatgcaaacgctggtagaagcatcatataaatggattacatagacccaaacagaatgtaatcgtttaaaacgatgtttatttagaaagtactcccttgttaacaactaaatttagtagcatctgtgtcaggaaagaagattggatcaaaggaaagttggaggcggagatcgagttcggaaacagagcaggaatcggctggagtctagatcggctacgattaggatcggttgggtctgagtcgggctaagtaagctgatacggccgattccgacaatacgacttgtatgcgacatcgggttcaagttaatgtacttcaggatgattgccactcacggatagagtcctgggaaggcaattgtatctattaattaggatattttatgtaaattccttatagataatgtgggcaaaagtctgccgcaaagacttatggtatcttagagtttgttagagataatagtcatgtccggtatgggcatatcttgtaattctcgggtataaatagaccccgagccctatgtaattaaaaaacccacgttcaatataatctcagcgcatcgccacccttttgctttagttttgtttcgacgggttcttgctttcgggttgagctgcatcggtttcgatcttcaacaagaggtaaaactcgttatgacggattgtgtttttaggattagtgcttccatctttatgatactctaatcttatttatataattcgtcgagttatcatatatcttatataatctttagcaatatcgccacctaatctactatcggctaacatctgtacgcagagggcagctgattaggttagatcttgatgttgatctagattatatgagttatctaccattctatgaaacttctagcggcttgattgtctagatatcgttattcttttcatatttattgctgcatcagttaagtttgatctattaagtcgtgcctagaatatcaatctctagcctgccttctagttgccgattagaatagcatcggagttgcagccgatcgtatctgatttaactatatctgttctatatgcttcattgacatgttaaatctgccctttatatcaagatattgctgtatctgagtatattaggctcttgtccgatatattattcttactttaatatcctgatatagagtagtatcggagtattagctgatacatgctagatctatctgatcggctatactataaacatatatagtcttgttattgacatatattttaatttaagtgatttatactgtctcggcatggtgaccgatctatcccaatcacttgatttaagtatatattgatataagaagtatatatcattagtcgatcgagtagatttagttcttctttacttgttcatgactgctgatcgatgcacagatgacatcggcttaaagataaatgatatgtcatcggcatctagccgatcggctatcatttatagatttaaccacggtttctttgcttctagttcttgatgattacaggatcaaatcagctagcacgctaacacatctgaatgcgagctttggacctgcactagagttaagcagatctctcagaccacgtgttttctgtcaacatccctctgtttcagattataagacgttttaattttggttaaagtcaaactactctaagtttgaataactctatagataaaaagtagtaatatttacaacaccaacatagtttcatttgagtaactccataattgataatatttcataatttattagtttagggttaaaaatattactatttttttttacaaaattggtcaaacttagagtagtttgactttgataaaatatcttataacctaaaacggagggagtagctaatacgtgtataatattttttatacatgtattaactgccaaaaaaaatatagggacgaatgaggttttatgaaatatttatcctaaaacctgtgattctttgaaacaagttataaacacatgctacaaatttagctggacggtttctagccaaaaattattaagtccatatcttttaacaaacccgctccaaaattgatagaaacctgggagagttctttttcctcattgatagaggcttgtttccatgacagcgtcttctgaatatagtattagcacttgaaagaaaattctacagcagagaacagctcaccgatatacaaaaccagagattatgcactaaaatatgtagtaacaaaatagattcgagcgtcatgggcggcaggcctctgcaaggctgcaatgaacctgtagctgtcggcgttgcctttctttggttcttcgcgaaacagaaaacggacatgtactacatgcctagcacgttgcattagttcttagtcaagtggcagttccattctcttctttcggcgtcatgacctctttataagtggacacatgtacagtacttataagttcaaagcattcatttaatcttttattttttactccatccatttattctaaataagtttatttataagtaatcatcacattagagtaaataaaggtacaaaataaatgcattgaaagtaaataaaaaattttttatagtgggatttgataaaatagatatattctagtcagtttggttttatattggtatgtgtaggatgtgtgaaaaataaacttattttgggacggatggaatttttttaataatataccatcaataactataaaattaacgtcatattttcaaattatcacgctacaataaacatagatgttacattaaatactccctccaattttttgaatctacattaaaagatgattgtagtattagttaaaagttacggatatttattaaatgccatgcacttactcctagataagtattaaggcatactattgtatgggttctttttttacatgaaatactattgtatgggttcttttttttacatgaagtacatttgataacatgaaagagagaagagaggaaagggaaacctcgttactatatttgatattagcttagaatcgagtcttagcatttactaatactaaaaagaatttggttgcatggagtgaaaaaaaaaaagataataccaaatattttgatacaataatagataagaaattttgttgtctcaactattaaaaagatagttgtattaacaagagcatatattggaatttacccatgtccatgcccttatctagataaataagcaggagtattttcatttcccaaatttgtctgacccatttggccagttcaatccaaaaaccaagtgtccaaaatggaatggatccgtgccattgttgccttaatgccgtcctcaggcgattttctccgttgtacacgccctgattacacgggtggcaaaaaatagcctgattcttctcttcttccttttcactgtgctccatatgccctcaatatcctatcaaatccaataaatacccttgacacactaagaatcgaattataatatttacatttctgcccctcacagggctcaactgaaattacagaaaattgtcgaagggatcaagcgaaaggcttcttttatgtggaaaatggaataaaagtctcggattaaagaagcaattgccgtttcagacgagggtggcagccatataatttgcttgcgccaaaaccaaacatagagcagcaatagagaggaggagagggagatgatggcccatctccttctcctccatccacctgccagctcgaagatttctgtctgaatcgatcggatcaagatcaaatcaaggagggaggaggttgagcaattcctgacagggacagatcgggaaagctctcacagctttttctttgtttttgtttgatttgttcctgcttttcgattggaaaattgggaggggaggaaggtgatagccattgaggtggtggcatttgctgtcaccacctttagctatcgccttcctcttcctcgtctcgctcgccccccggtctagcttctttctgcaggtattcaatcgatcgagcaatcagttattttcgtttttgttcttgttttttcttttttatcatggaagctctctgttcatctgattttggtagtgaatctttaatttgtttgtatggcacgattcacccataaatcaatcgataattttgatacgattcagagagtgattgatttactgcactggtttcatccagggaagaggggaataaaattactctttttgcaaaaaaaaaatctgaaaatagggaaaataatccagcaaaatcgcatgtaattttgatgtttgttcatcgtttcaaactatacgtattaggagaaaccaatctctactgctcctggctgattttgtgatgaaaaatggccagtttcctctaaaacaatgaccaaatttgacaccctcttgttcttgaagggccggacggaaaaaacaaaacaaaagaaggcaccagccagccatggcgatggtgctggactccttcgtcacccggtgcacggcgtcgctggaggacttcgccgggcaggaggcgtgcggcgccctcggcatcggggacgacgtgcggtgcctcctggccacgctccggcgcgtccaggccgtcgtctcccacgaggagcgccgcggcagggtgctgagcgccaaggtggacgcctgggtggcgcaggtgaaggacgcgatgtacgagaccgacgacgtcctcgacgtctccatggtcgagggcggcaagatgctcgccgagggggacagcccgccgacgcccaaggcgcgctgctccctcatgttctcctgcttcaagcctgcatccgcccccaagttccaccacgagatcggcttcaccttcagggagatcgacgccaagctgagggagatcgaggaggaaatgcccaggctccccgcaggatctttgcactctgaatcaagaagggattggttcagtagaggcatctgcagtaacttctctgacgccattaggccactcgcggttgggacacaggttcagaaatctctggatggccttgtgcctaggatgattagagagggcaagaagaaggtggatgtcttggccatcgtcggcgcagtggggatcggcaagacaatgcttgctagggagatttacaacgacgagaggatgaccgaaacatttccaattcgtgtgtgggtgaagatgacaaaggatttgacagatgtggatttcttgaagaagatcatcatcggtgccggtggtggtgtcaatgttggtgagattgagagcaagaaggagctccttggaatcgtcagttctactctttcgaagaggtttctcattgtattggatgacttggacaacccaggtatatgggatgatctgctcaaagatccactgggagatggtgtggcccgaggcagaatactaatcacaacacggagcgaggaagtggcaacaggcatgaaggccatggtccaccgcgtcgacaaaatggatgcagagaatggctgggcattgttgtgcaggcagtctctcccagagtgcagttcagaagagctcgcgtcactgaaggatgttgggatcaagattgtggagagatgtgatggccatcctctagcaatcaagatggttgctggtgtcctaaggtctagaggcaagagcaaggctgagtgggagatggttatgagaagtgatgtttggtccatgcggccaatcattcctgagctgcctcaagctctctacttgagttatgttgatctgccttctgaattaaaggagtgcttcctccattgctctttgtatccagaagaattacccattcagaggtttggtcttatccgacgttggatagctgaaggccttgtaagtgacaaagacaataagttgctagaagattctgctgaagagtactatgcagaattggtaagcagaaacctgttacagctttatgctggtaatcttgatcagtgctggataacgcatgatcttcttcgctcactagcacgctttctgataacagatgagagtatcttaatcagcggccaacagagattgagcacagacccattgtcattgtcaaagccacgacacctgacattgtgcaacatggaaaacagatttgatgatccaatttcagtaaagcagcagatgagcctaaggtcattgatgctcttcaatagcccaaatgtcagatcaatagataatctcgtcgagtcagcatcatgcttgcgtgtcttggatctgagcaagacagcattaggtgctctcccaaaatccattggtaacctgcttcatttgaggtacctcaatcttgatgaaactcaggtcagagacataccctcttccattggctttcttataaacttggagactttgagccttcagaattgccagagattgcagagacttccttggaccgtcagggcattgctacagcttagatgcctttcgctcacaggaacttctcttagtcatgtaccaaagggtgttggtgatttgaagaatctgaactatcttgctggtttaatcattagtcacgacaacggtggacctgagggttgtgatttaaatgacctacagactttgtcagaattaaggcaccttcacatagagaacctggatagagctacttcaggcgcttctgcacttgcaaacaagccattcctcaaggatctacacctctgtgaacaggcaccattgatagaggagcagcaatctgaacaagaacaagagaatcaagatgaccaaaaggaaacagaggaagaagagaaggaagtacttgatgtaaccaatagccaatttagtagagaggaatcaatcaaagcgagcgaaaagatatggaacgaactcaccccaccccagaacattgagaaactagtaattaagaactaccgaggtggaaagtttccaaactggttgacaggtccaaagctgggcatatcattccctagtcttgtgtacttggatatcgacaactgcatgtcatgcacggcactgcctgctcttggcctcctaaaccaactccagtccttgcaaatctcgaatgcagactcagtcgtcaccattggtcctgaattcctcggtgctgcttcatcatcatcggccactgcttccttccccaagcttgagatattaaagctcagaaacatgaagaaattggaagagtggtcattagccgtggaagagaatcagatattgttaccatgtcttaaatcactgcacatacagttctgccccaaacttaaagctctaccagaaggactgaagaatgtttcgctgcgtgagcttcatgtcgagggtgcatatagcctaacagaaataaaggacctgccgagaatatctgatgatctccaactcaaagacaacagagcacttcagaggatctctagcttgcccgtattgcagtctctcaccattgacaactgcccaaagttgaagcatgtttcaggccttgacacactgcagcatctcaggctggcgttccctccatccacagagacattttattttgatgagctgatcatcttctggagtattgcattcccacggtggctggagctgttgatccgtaagcgcgatgggctgtgccatttcgagcttcagtgcagcctctcattgctcaggagctgcctggacggtggcaagaactggagcatcgttcagcagatccccgaggtgcggatcaccagcaccgatggcaagaggtacatccggtacaacaaacgccggtgcatctatgagacgaatgctcaatctgaagattgaagccttcgtgaaagtcccagtgcagtacgtttttttttttcatcttcattgtgcagttcatcttgtcaaggttctcttgttcagttgtgtggtgtcattacttacagaagtgtatattttcgttgatttattggcagtggtttgggttgttacaaggacacatctcagttttcctgggtagtccttccatgagttttgtttgcaatatttgccaacacgtgcattcacacaggctattatgtaagcctttgttctatcttttctaattacatttgttttgcaaatcaaatatccgataaaatttagttatcccttgggataagggacagattgaaaaactgatatgcaggtatatttttctcacataagattccaacattgatggaaactagatacgataatttgttcggagtttctaacaggtcaattcatatatctgtataagccgtaggtatattaaacatgtgctggtttaaaaagttgatgattacaaaacctactctcttcgttccaataaaaaccaacctaggattagatttgatataataattgtggaggttggtcttttttttttttttttttttgggatggagggagcatttcacagtaatctcacttgcacatgtttttttccaggttatagtaaaatgaaaattgtagacaagacaaaacaagtctaaaatgggtagggatgaaaacggtatgaaaacttcccagattccggacctattttcgaaaacaaaaactttcagtcggattttttcggaaatggatatgtttgaagtggttcctacctatgcggaacgaatgaaaatgtagaaccttgtacagttggaaactcggataaagcagagttggtagaggacgattcaggagctgaatttgtatggattcaagccgcattttcccgctaataagtgaacaaccatgatgatttcgccatgacgttcctgctatatgcgatgggataaatgtattgatgatattcatgaaggggcatcagcagtttccggctttcccgcggagtggggcgggagggaaaggagaggaagtgggatggggtagcggaggcgccaccatccaccaggcgtcggcaaagcggatgtgctccctgccggctccaaccaacagagagaaacgccgcgggtggtggagctggggtgaggaagctgctgagggtgctgatcgagcttccctagtagcaggctagcagcaagccaagcctctccatcattgggacttgggaggaagagctatcggtggagacgtagggaggagaggcaggcgccacgctgttatgtcatggcctcatggggaggttacgggaggaggaggaagcatagctgcctagaattgggctttttgatattgggccttccggtctgcacatgtgcaaccagttgtgattagggaatttttttatttttaatttttttaattaaaagttttacaaaaaaaattttatttcaaaaaatgacaaaactaatctccccagagggcgggaaatgtgacgtggcagacggccgttggctctcggacgatggccgtcaaccgagggcaggacattttgcaggcggcccccttgccgccctcggcaagggcggttttaaactgtgcaggggccacctacaagagggcggcgagagggcgtggattttttttgcaggcggcccccttgccgccctctgggagggcaattttgtactgttgagggaccaacagccaaaaaaatcatagttttgtaatggttttgatttattttgttatgtttttgtattgaatcgtttgttataaaaatttgctaaataatcatattgaaaacgaagaaaacatgagtaatgtttgtagatttgtttgatgtaaaatatcgtatttgaccgaagaaaattaggtaaataatgagtctgaaaacaggaaaattaggtagttttttttaaaaattttagatgaatactttgcagtcaaattggaggccgaggaggtggtgtgtgactttgaagtgttaggttaatgatcttatagaaacaaacatagtatgtaaaattttgtaagtattggatggtatatttttcagccggattggagctagggatggtgtgctctagatcaaactaaactacattttacaattaacactacgatctaagtctcaattcctactaatatcttctgtgccctagatctatacaaatgtgttgtgttctacagatgtactaaaatatatggaactaaaactaaaatgcaacataaattaaaaacacaatgtatttacagatgatgaagtgagcaaaccagcaggggcttcgccgctccccttcttctaccccacacccctccctttttcttttttttggaattttgagtgattataatgaaaattcagagagggggaaggggttttattgtgtgtgtgtggggggggggggctgcaaaattccaggccactcgctgcccttttgcaggcggtcccctcaattgtgtaaaatcgctctgtgtaagggcggcaagggggccgcctgcaaaatagccaagcccacgtcgccgccctttttgcaggcggccgcccgcatagtgtaagatcgcccttagagagggcggcaagggggccgcctgcaaaactgcacgccccctgttgacgaccatcgcccgagagccaacggtcgtctgccacatcagatttcccgccctccgggagggcgatttttaaaaatcgtcccccccgagggcggcgggagattagttttgtcaatttttgaaatagaaaattatttttgtaaacttttaataaaaaatttaaaataaaaaaattctgcgattaggtcggatggctatcatttcattggtgacaattagatggttgtggtttttgttggtgacaaggcttcaccacaacatagagaattgctattaactacactaagtggggatgcattgtataggtttattataggataacacaggtaatcttaaacgctacaagtaataacacaggtatacagtagtgtagtaccttggaaagatatagcaaatcgttaaatatcatatgaatacttaatttttcttcaaattgaggaaaaaatggtggcacattatgataaacaaaattgtattacatgctccttccgtttcatattatatgactttctagcataacatatatatgaatgttggcaatgctagaaagtcttataatatgaaaatgatgaagtatacttttttcttcaaaaaaataaaataaaaattctagattatgtcgaggttcgtggtagaagtttacacgtagggattggtgacgatacatgttggtaccataataatacatcgatgatacttagaggtatgcttgttagatatgggtgatgatacacataggtaccagtggtttcgttggtacgttttagctggtatcatataggtgttggcgatgatacagcataggtatatatcaatgatgatacatttaatataaatactagagacggtgcaacataagtacatgatacatgtatgtaccaaggattatataataaggttggtgatgatacatgtaagtaccagggacgaaacatgttggtgagatatacttgtactagtgacgatattttgtcagttatgaacttgtgatgccttaagatattattacaggtaaagaacccatctttacttatggttcgcaaccccttttaatccctggtacacaaccaggataaccaatccggaactaaagatgcccatctttagtctcggttgaaatagccgggactaaagagtttttttcttttcttttttcattgtttgcatattgatttcgtgccaaactcacggatcaaataagagtaaattacactagcggtccttaaacttgtaacgaggtttcacttaggtccacgaacttgcaagcaaaatgagtatcgtggaatttttttattttttctcccttcttccttcttttttttttctcccttctgccattggcccacctgtcagtgggcctctctgacctcacattagcctcttctctctatcctctctctctccggccggttacgcaggatgggcggccggctaccgaagcagcgacgggcggagcggtcggcgagaaaggagcagtgcgtaggcaccgaccggcgggaggagaggagcggtgcgcgtgcacgggcggcggctggagaggagaggagtagcgggcgtgcgtggacggcggttggcgagaaaggagcggcgcgcgtgcacgggtggcggctggagaggagaggagtggtgtgcttgcacgaactgcggccgacgagaaaggagcggcgcgcgggcgccagccgacgggaggatgcgcgtgcacgggcagcaattggagatgagaggagcggtgcgcgtgtgggggaggcgtcgccgaccatgcccgggaggagaggttgctgactgtggccatgcgtgcggggggaggcgtcggccatagagcgcgctagcttggcggtggagatgaattcgtcgccgaccacacgtggtagaagtttacatgtagggatttgtgatgatacatgttggtactgtaataataattacattagcggtccttaaacttgtaacgatgtttcacttaggtccatgaacttgcaagcaaaatgagtattgagatccctaaacttggtttaatgtatcatctcggtccaaagcctcgtttgaccgtgatcttgcctacgtggcgtgccacgtggacgatgacaaggaatttttttattttttctcccttctcctttttttctcccttctgccacaggcccacctatcagtgggcctctctgacctcacttttccctcttctctctatcctctctttctccgaccggttgagcgagacgggcggctggcgatgggcggggcggccggcgagaaaggagcggcgcgtgggtgccggccggcgggaggagaggagcggcgcgcgtacacgggcggcggctggagaggagaggagcgtcacgtgtgcgcgaacaacggccggcaagaaaggagcggcgcgcgggtgccggctgacgggaggacgcgcgtgcacgggtggcagccggagtggagaggaacggtgcacgtgcgggggaggcatcgccgaccacgctcgggagtagaggttgccgaccgtggccacgcgtgcgggggaggcgtcggccatagagcgcgcgagcttggcggcggagatgaagtcgtcgccgaccacacgtggtagaagtttacacgtagggattcgtgacgatacatgttggtaccgtaataatacattgatgatacttagaggtatgcttgttagatacgggtgatgatatacataggtaccagtggtttctttggtacgttttagctggtatcatataggtgttggcgatgatacaacgtaggtatatatcaatgatgatacatttaatataaatactagagacgatgcgacataagtacatgatacatgtatgtaccaaggattatataatgatgttggtgatgatacacgtaattaccagggacgaaacctgttggtgagatatacttgtactagtgacgatattttgtcagttataaacttgtgatgccttaagatattattaccggtagagaacccatctttactcacggttcgcaaccccttttaatcccgggtacataaacgggacaaccaatccaggactaaagatgcctatcttttttgtcccgattgagcgggatgggcggccgtcgaccgaagcggcgaaggacggggcagccagtgagaaaggagcagcgcgcgggcggtggttggagaggagaggagcagcgcgcatgcgcggatggcggccggcgagaaaggagcggcgcacgtgcatgggcggcggctgaaaatactccacatatataataccttattcatattaccttgctatttttaacgtagagaaaagtttcagtaactgaatttaggtgatggcattaaaaggtggtcttttctcctgaagatgaagacgaagatgaagatgaatattaggtttttttacgcaaaacgaggtggtattaatgtacgattgattgagttttaattattacaaacttgaaaaatagattaatattatattttagagcaactttcgtgtagaaatttttcgcacgaaacgcaccgtttagcagtttgaaaagcgtgccacgaaaatcctaatctttatccaactcatgttggagaaaagaacaggaccaaaatgtgttgcacaattcagggtgatgagacaatacacttcttttttgtgttgttcctgtactgtatttatgctcccttcactaagaaatgtaagacatggtttgtcatggcattctccataattgaacttgtccagatatagtgtagttctttatgcatcaggtggtattgcaaaaggagaaaaacataattaattcttcaggatctatgatgctaaattggttagtccatgttttgcactgttattatcactgatctggaattattctcgcagaactcttaagggtcatccgaagattgaatttgaaagagcagtggactgatgtgctacttcactttattactttgtatgctctgagatcaacaatctctcatgatagatagcatattgtgtaatgctggagacgtggatagagattagtacgttcattacaagtgaactcgtggcataattctcttgatttttgtggtgtttgatacatgtctttaatggactgtatttgattatttcaattcagtccctatcatttgatttaaaaatatagcattcatctgtaatctctggagataattttcattttgtaatatatataatagtttgttatatgcacatagatcatgattttttatgatgttcagaagactggtacatgtgaatagaaaaaaagggaaatgtcatgttgtttggggtgaattggtgatagtttatggcaatgccaatgtatttgtacgggaggtatgttatagggagatctgcagctcatccatgacaaatactatatctaggtatgcttgatgttctagatattaaatttccatagcattcttctatctactactatgttctaaatattaaacaccatgagattgttttatatgccagaaagcttacactcggattgtgtagtggtaatagattttttgtattgaaattaatttgaattaaactacagaacaattttgatttgtagtctcttcgatttgccagatttttaaccgtgttcaacaaattttcactcaatgattatttaacatcttttcacctcatataatttgaaattgatatatattatttcacgttgcaacgcacggacacccagctagtatatatgtaatttgtaaatatcatttacatgttttagcaatgtaataatcatgttgtttacttgaatttattggagcattcagttttgtttgcaaccataaatttatttccttagcaacgcacatgcacttaatttgctagcataataaattcaaaattgctagacgagcgaaaaagttagtgacacacaagagattctcttgtgtattcgtaggagagattatattcgtaagagtaacaggaaaactcaaacgaaattggctgcaaatgaaattttgaggcttaacttgtcataagtcacggctatttgctagctgacgagtactcataatgttgaacagaaactaaacaaacaaacatcaattaagttcgcccgccctatatatctgtagaacagtagaagtagcagatatgaatcaggccattgtaaagcggggttcagagcctctcgccacggatcctcctggcgagctgaacgtctttggacatgatggtgacgcgcttggagtggatggcgcagaggttggtgtcctcgaacagacccaccaggtacgcctccgccgcctcctgcagcgccagcaccgcgtggctctggaacctcatgtcgtgctgcaccgcaccaaaacatcgcaaaaatcaattaacgtacgtacaagcatccttagaatagaatgaatcgatcggcataatttaaacgtttggttaccttgaagtgctgtgcgatctccctgacgagcctctggaacggcagcttccttatcagcagctccgtgtttttctgatactttcggatctccctgcaatcgtatatatatgatataattcaaataaatataatataatataactgcagcagaattacttatggagagagttaagcatgcatgcatatatgctatggaaagatcgctcaaacaattaattaatttgcttcatcgttcagttctttagaagataaaaaacagctatagcgtggcgctgggacatgtacatctttgacatagatgctggattgaattctgtcatcattgaagaaaagaatcatgtatctacctaagggctacggttccaggacggtgtcgacgaggcttcttaactccgatgaacggaacggactttcgagcgactcctctgctggacggagcaggcataacagcggctatctgcatgtcgatcgattaattgtaaagatgcatcgttcacaagtgaaacaaaattaattagtattgtagtaatcatttttggcaaagcatttgtacatacagcacggagtggctttctaggggcctttcctcccgtggatttccgagctgtctgcttagtacgagccatcctgcaatccatatagacaagaatatgcacattatccacattggctataacgctaagacaacaattttgaagaccctataatatgaacaagaacggcgggagctctgcggtttacaaacctcacgcagatccaaaaacttaattacaacgttcacgaaataataataatgttaattaagattagacttaagaccttaattagcgccaagaacaaaaaaaaaattctaatccagaaaaaaaaaagaacaccttaattagcgtcgtagatgaataatggtggcgcttgattggcccaacagatttgaagagggtagaagaggtggaggggcgatgattcaacggctaacaattctggaaacaaaccggtgacaacagtgtttcgggtctttggagtagaggagaagagtccggatcaggaagggaggttacaagttgcgaagaattgggaagaaaatagaaaaggagaaggggaagaagaagggtcaaaaaggacaatgcggatatttgccaataaattcttggaataaatttggaactctgaaacatggttcgaaaagtgtagagagcaagcctaaaaagtctttagatatgcatgaaagtaagacatttttcgtcaaaattgagaaaaaaaaaacaaatggccgagcaattatggctttataattaattagtcgcaataaatctaatcttgtttaaatatctcgattaagttaaactaagaaaataaacaccaattcaaattttaaaagacccgtacaaactaaaaaaaaagaggaaaaccgggatgttacagacagagagatgcttattattagtacaatttacaggaaactaactagtgtggagatcgattgaagaacacgttaattagtaggacaaggaatttcattagattaaaaaaatgataacttattttatacctctcacagttcgacgagtgcagcaactgctattgctgtgtgtgcctccgaaaatccccctcaggtatgttttggtgtgcagatctgaccggagaagagggctaatttataggcgatcgggcgggctaatttaccgttccataaaccgacttattaattagtttttatttaaccagagctcgattgattaccgttgcatttaattaatcgacggctgatatggtttgtttacgtggtggcacggatcggtgtcgatgcacgccgcactgctattggctggcgctactaacacaaggatttcctggttcctgcgaatttatgatggtaatcctcctttggataaaaattgtttcctttcactgtagatcatcaagacaaatcatgccatatatatctatatctatatctatatctatatctataatataaaaaggaggagttgtccacctccaatcctacatacaaaatcattcggattgatccctaccgtccatctgcgcgagtgatttcaccaccacacgatccatccatccacgccgaatacgccgaatacttcgctcctcctcctccacccgcgaagacatcaccccacgcgcgaatacttcgcttctccagttctcctcctcctcgctcgcttgctcctcctccccgcatgttctaccgccgcgccgctgcatcctctctggagatcttccccgcgtggactgccgccgccagagcctctgattcttccccgtcgccggagccagtgcttcttccccgcgtggattgtcgccgcatccccgccgccggcgccgctgattcttccccatcgccggagccggtgtttcttccccgcgtagactgtcgccgcatccccgctgccggagccgctgcttcttccctgccgccggagccgccgtggccggttccgacctcaactccatccgccggcgccggcgcctagatccactgccgcggccgaagccgactttccaccgcttccttgagacgttcaacgagagagacgactgccggtgcgacacttcaacattatgctctaccacaacgctacagagtacagaccaggttcggcacaatactaggtttcctcgcttttaacttcacaattgcttctgttccttctggtgtttgttcccacaaaatgcatgtggcatggaagatgcttgatggaatactcaattgattattcgatacagtatcatttgttgcagtttttagatcttccaattaactagcgcaacaacaacagattctggttcctctttctttattttctgcttgccatttatatttatatttatgttcgttaaaagaaattcagcactgaagtataaatgttcacccatttctctgtgatatcaggcttgttaacaacaatgtttttgtgcaggaattcctatttattaaaaagctatggtatgttagctacattttaaacgaacaggatatgattatctgagctttgtccagctccagtctctaaagatgggatgttcagtttgtaatcatagaacacacgcgcaacaatcttgcagtggggaataccatgatgcacaggttagaatgagagagggatggcattggaattgtcaaagatttctcatacacctaagccaaagccctttcctcttttggtctttccttctttctatgtaacaagggaatgatctggtcacagaatactgcagcggtttgatcaacgaaaagcaggtgataaatgttggtgtttgacttatgcccaggttactgtcacgcccataaattcacgaaccagaatttttaagctgaatgtgcattaaatccctgtctaggaccagccaggatatacaaatgacaattgttgacatatagatccacgtcttacaaaaatagaaaagattacaaatgcagccgaaaagataaaagcgagctaaaccgggaagcttgacttcagcagcggggcgactccactccacacaggcaatccttgacggcggcgatgaaaccaactttgacaagacagctcccactaggaagattttcagttctggtgtggggaaaaagagagcaagactgagtactacccactgtactcagcaagtcataccggaagaggaggtatgatgcaggatataaccaaaggaggctaggggttcatttgcataaagcaggcatttaaaagcagaagttgaaaacagtaaaacaattgtagtaattaatcaacattaaccaatcactgtccaatgctacaccacgttgcaacaagcccaaccaaccacctgaactacaccagttcattaagctaaactaggggtgagactaatcacggtgaatctggttgatcgcccataaccacgggcacgactattcgaatagttttactctggccagaggtgtacaactgtactcacaagacacaattccacacatgttgccatgccccgaagtatcaccatgatactgcaaagggggaaatcgtgacaagaccctccgcataaccctcccctaaccatccacaccacgctaaggtttcacccgcacccccaacgggcagtgggcggtcccctcttgcgccgcggtgaatccggcagctggacaactggacaccccggctgacccaactccatcatgcccaccctcaccaccggtgcctaggaaagggtcgagctatacttcagatcaagcagttacccactcccgcttgtggtaagcacgataagtcttctagggtttcccgtgaaccggtccttaattgccatgggtgcgaccagaaaaaccatgcacccacagcccacccttcagtgtattttaattaactaacaccaatgcggtggcaccaatccaaagctatgctcatagtcaaagtctatgtaataatgtgatccccatttgtgtactagttgaactacacatagctaagcatttcctaaaccaacatctagtcatttggacactcaagttatcaatggcataaggtaaacaatatatggctgagtaatgggacccatcccacatgacattgtaaaagaatgcaacatttaatagaaatgcgggatatttgtaaattgggtacaatatgatgaattgtaacgcatgacttgccttcctttcgcactgatgagcccacatcaacgtcttcgtggaaccgcggatcgacaaaacggccgaaatctacgcgacaaacaaaacacacaagcaaaacacactataagactactgaaaaaggaaacaaaaccatttttaatggattctagggatttttatgaatttactgagacttgaatggacttaaacggagctcggatgaattaggtatgaattttagaagataaactgtgtttttactactaaagaaaagcccttaattaattattgcgcaataaatccccagggctgacgtcatcaagggagggggcggcgccggtaagcgggccccacatctcagcggctcgaggtggccggtccaccgtggaccgggaccacatgagtggtccaccgccggtccacgggaccgacggtacagatcggcctgaggccaatcggacggcgtaggtgaggctaggcatggctcggctcggcacaaagacggccggccagccatggggagcggcggcggcgagcgcgcgccggcaacggaaagcggcagtgcgggaggcagcggcggacgtctcactggccggcggcagcggccgaaggcgatggcgagcgcagagagtggcggcgcgtgcgggacagagggaaggagggaggagaggagctcctcaccgatgagcacggtggccggcgcgaaggatggaggtggcggcgatgaccgcgatgcggagggacggacgggcggcggcgacaccctaggagaagatggagaggcgtcaggagaggagataacgaccacggcggctttaaacaccggccgaagatggggtggacggcgtgactcaccggcgtgcgaggagagaggcgctccagtgggattccggcaacgtgaggcggcggccgggaaagctcttgcggcggcggcttggcacggcggcggccctagaagcgacagcacgcggccggagatgggcggcggcgacggagctcggcgagcgcggcgcgacggcggtagagggcgtgggagtggacggttaatgggggaaatgagagagagagctcgagggaggatttttatgggcgctttgggggcagaaacggccgaggatggcccctatttggccggcgacgtggggagtggagagagagagagaggtggattcgaatgcgaatcccgcccatttttgggcgtgcgcgagagcgggaagaggtggaggaggtgggcggcgatgtgggcgcgagcgcggggcgcggagtgggggcggggaggcggaaaacacggcggcgcgggcggttactgccggggcacggtcggctggaggaaggggacgaccccgacaggtggggcccacctgtcggcgttccggagggaaggggaaggggaaacaggccggcccaacaaggggaggtggcgcgggagagagatgggccgacggcccatcaagagaaaaaggaaggaaaagaaaagataaagaggaaaatgattttcctgggattaaaaatattgcacttgctcatttttaattggttaaaattatttatagggctctgaaaattccactaaaaatcttgttaatgcattagggcatggggaactcaagaaaaattccaccacgctatttccaattattagttgcatttattaattagggattcaactctaggttaattagaacaatttctccagacgatttatttaacaaatttttaaaacaagaaaaaggggaaacttcaaggcgtgacaaagattacccaccttgattttgtgcctaccttgaaacatgaagcctcaatatgattgttcaccattccagcttaccaactatattgaaatatcaatctattatgtaagctgcctttacaaattaattattactctttgttgataatgttcagagccactgagcttgttcttgctttcaaatatggtgctgctctcatgaatattgataaagtttgccatctcttcatggtagttttgtatgtttgtgcaggtcttccaaattacacatagttcattatgcttgggacagaataatacaatagttgatataaatgtgcagaaaaaactgaaagaaatttcagattgcttaatattttgatgtgagtttatcacgggtgcatattggagtgactgaacaatgattctcattggtaatcattttctcctaccttctacttccttcagtttctcatattccttttttacgaattatatacctccgtatttaaacagctttttatatatttgttttctataaatattaaatgataattactcatttttcattttttttcgtggtggtacactatgagaattttccgaaatactatgtcctgccacatggttgctgaatacattcaagggcattgcactgtccattccattcagtactgggcatatgcattacattaggcacacacaggagaaacatgccatagattaagtcatagagttctgccttcaaatttggaaagaaaaagatattcagagtggcttcagccttcaggtaatgttacgcaagcggacaataatgttgttattaatttgatatatttttaagtgctatagaaatcgatgaaactaattcaggttttgtagacagcttggtgatcaaggcctaccaatatttaatgagttatgtcccttgattgatacactaaagcttattctcataggcaattttgatctagcaaaatatgtgtgcaatgggtgcaagtaatagaagctgcaaggcatattatgaacaatcaaattgtttctgaactgaagtagcaggtttaattttggtcaggtatttaatacagaccaaatttatagtggtaagaagtaacgagaaatgcccgtgcgttgcaccgggtattggtggggtggctgaagtttgatattaacgacttatcaaaagcacacgagatgattataagtacaatgataaaaaggtcatgtttgtttttgataattaatttactctatatttggacgacttagatgacgcttctgacgtgtgtgggcttgatggtcatggcaagggaggaatgagtggcgaacaattaatgtgtctccttttgcatatagggcgacatatggaaatttatgtgatgaaaaatgaatggaattgacctaaaggcacctccccagatttatatttccccatatttatatttgtagtttaattaaactttcttcagcatttatttaatagagttgtaaccgaaccaagggatttcttgagattcttaagttatcaatggtgagattctgtcaggtgacttctaaccttgaatttgtttcagaagtcaccagattgtttaacacgctagatgctatctcactgcaagatcctgcctttttttttatctgaagttatactgagctgctacctcctcaggcttcattctgtccccgtccgcaccttcctcgatgatgataaccctaccgcaaggtaactattcatgtcatcttctttgggtattcacgcacatgtggcaacacaacagattggtacatgtgcttttctacagccagatcattgcacaatgtctagaattttctacttatttgcagggtgacatgagaattagtttatcaccccggtcgaaggtatgccccaaaaactagattgaatatacttatgtctctataaagggatattgtgtggattctatgcagctttcagattcgtatgctaaattctatatagatgtatatgctgaattttatgccccaaaaactagattgaatatacagaactatatgcagcttttactctttgaaggtgtatatgcatgctaccatgtttcctgctaagctgtatatagtgcaatttactacgtcctctcttttttttatatatataccttcacagaagacagtaatggatgcaggtagctaactgcgtggaaattggtcttccgtcactcattcgcaaaaataaaagagaagcgtctccattgcttctgaattctggtgccttgcatttgatttaacctcaggataaaaagagtcttgggatatatggcttctttactttacggattgctcttcctgcccaataaatgtattttgcagccttcaagcagataaggatcatggaggctctccaaatgatatatgcttctgttcataatctgcttgtgggttactgtttctgttgacacggataattagtccatctctgtagtcacagatgacaacttttttcccttcaatgcagccacatttttgtgatgctttacaatcttgacagtcagtgcaaaaggaccaatgcagaaatccataaaactgaacaaacaaatggtctatgttaactgagattataagcaagttatttttatactgaaatatatttgtcgccctaggaatatttgagggctaatatatttgtcaagcttaaatattgaattccaatccatgtgcacttggcttcaaggtaaacataattttatttctaagatgtcattttagtttacagtagatgtacacactttaactaggtatgctgtttttaactgtgaactcaataggtgtaactcctactatttaaatgcagatttcaaaaccaagtataccaaaattggcgttgttaagtagttgtacagcaatactgactattatttggtttttatacaatacaactctgctaataagtatagaatcacatcagacatgtaggcatatatgtgcacatgcataaccaggtgaccaaggaagctatactatagaataatgtgaactccttccttttctttttctaattagacactttattgcatagtgttgtggtttgaatgtaaaatagacagatctgttgctcgaggtttccaaacatttatcaagctatgaaaaaaattacatatttggtatcattagatggagttgtttgaatgtaaaatagatagatctgttgctcgaggtttccaaacatttatcaagctatgaaaaaaattgtatatttggtatcattagatgtccttcatttttatagttagtgtaaagggagagttatgtggcatattaatattaaattttgtatttatatgtcctgtgtgttacacgtcgtcggaaaaccatataaatttgattgtgtttatatgtttactatgatatatagtgcgggaacgtgccttgcacgtgcactcttactagtatggaattaaattaagagatattacttatactcaaattaaatattatatctctatctatactattctaaaaattaaagattccgctaaaattttggtactccctccatttcatattactccctccatttctaaatatttgacgccgttgactttttttaaatatgtttgaccattcgtcttattaaaaaaattaagtaattattaattcttttcctaccatttgattcattgttaaatatacttatatgtatacatatagttttacatatttcacaaaagtttttgaataagatgaacggtcaaacatgtgctaaaaagtcaaaggtgtcaaatatttagaaacggagggagtataaaactttatagcatacattcattaacatctatatgaatatgaacaatgctagaaagtcttataatatgaaacggagggagtatgtcataagtgtttgagttagttctatgtcaccgtatccaattcgaagtgactccacccagcttaatccaaccggctcacaccaccttgatgctccatcccgcactgcgcgcctctccccgatcgacgtcttctctctctctctctccttttttttttttgctatttctccttttcttttctcccaatcatcatgtcctcttcctcccctttcaatctcctctattttctcctccttttctctttttccctcatttttcttccaaatttctctcctcataaatatttttttaaaaattatcattaaggtgtgtatggggcaagagtgttactttgcaaatgttttccatctacagttaaattcttttactaattgaatagtcaaaatttcaatctttgatcgatgacatatagcagaaaacataaacgtcaacttatggaatagccacccgatcgatttctgagactatggaaaggtgtacataaaagattcttcatgtgatgatgcatgaagcgagtgcaaccgggtttaatactatatatgatttatgactttgttttgtcattgttttgtttttttgtttgtcatttaaattggtaaagtttttatcaatcgtggaaattgtcttcacccgttgcaacgtacaaacatctttggtagtatgcatggcccctagtccaatttgcatctttgctaccgaatatgtttggtttctgcttccaacgttcccccttccccttctattaggtctaggtcggaagtcccttaaaaaatgtgatggccttttccacgtccaggttgaattacaatttacaccagatcgagcaatcttttgtaccctcctaactccatctccctcttccttcttgcttcatcctcccgccatcgccgcgagacatacgatcccatgaagcttgctcactcactgaaaggagaattaatcgtcctagctaagtgtaatatcccacatcgtacgagattgagtcgctaacgacgaagaagaaagcaaatacttgaagaatgggaaagggattctgatgtgaccatcaaatatatgaatacaaccaagtatgaatggacttgttctggttggtagccacgtcgcaaacgtcgcactcgatcaaagcgagagttatccccttattagaagatcgggccacgagagagagcgtcatcaaattcagagaaaagagggaggaggttgtcaacttacttcattttttctcgccaaatcctataaatctataagtgatcctcacttaatgtagttattacccaatttcctatcctgtagttcatccacgtcataaaaaaaacgtcaatcattgtatgaaatctcaaaggtttggatgcacccaaatcccaatggtatggatcagaacagtccaaacgagagagcccatgagcccatttgtacgtagcctcccgccccgcgactattaccaaaaacgattttcttgtacaaggagctctttagattgcagatagacagcacaaaatcgattttcctatacaaggagctctttagaaaattgattttcgcaggcaggcctcttaatggtccgcacgtaaaaataagcctatttttgcaggtggacctcttaaggggccgcatacgaaaatcaatcttcgcgtgcagacctcttaaaggcccgcctacaagtctattccccctcctatcttccctctcatcaatttcaaaatttttaagtcccattctttatctcctcacctctcattccacagccttatctcctctcccttgtcaagtgcgttgtgtgatagggtagctggccctcggctacggagctcgtagccgcgcgccgtgatgttgggcgaggttttccccctcagcaccgatagacagaggcaaagaggaagaatagaaagtttgtgatcaactccttttcttccaaattctgaatacaaacttaagtaggctctcgggccttaattcatggcgctaatcaaatcattgtaactaattattcctattactaaggatctgattgatccttctgttttcaaatccacgcgctaatcctgctcagccgcgcgtgatcgcgtatacggcgtcgacggcgcgccttcagtgcccctgatcttgcggcccttccttgtataggtgcggccccacatgacatctctccctccctcgacgagcagctcgtcctcgagctagaatgctggatagcgatccatgaaggtatccacatcttcccatgttgccgatgttgccggttctcccttccactcgatgaggacttgtcgcactcctcgagcaagccgcatgcgggtagcacgttcaggttctgggatggcagcaccgttgtggatggccagcagtggtggtcgtgcgtccggcggcattcccacaaacttcttgagaaggctgacgtggaacacatcgtgaagacgagtgcgcggtggtagtgccagccgcacggcaaggttgttgatgagctcattgacttggtaggggccaaaaaatcttggctttagcttgccttttgtgacttgaggaagcgaggccggttcgcggtggcgtagacgcagccatacccagtcactgacctggtaggagacgtcgcggtggtgccggtcgtagaaggccttttgaactgcttgtgcttgctccagccggtagcgtatgtcagctaggatcttgtccctgtcttccatgttgcgagctactgccgccatccgtgtttcacctggttcatatgaacggatggttggtgggtcgcggccgtacaccacgcaaaacggggtatcccgtagtgacgtttggtacgccgtgttgtaggtgtactcggcccatggcagccagtggatccattgtcgcggctggtcgccggtgaagcacctgaggtacatgacgatgactcggttggccgcctctgtctggccgtcggattgcgggtggaatgctgtcatcatgtgtagcttggtgcccatgagtcgcatcagttctcgccagaacaaggaagtgaacactgggtcacgatcggagaccatggactgcggtacgccatgcagacgcacaatgtcggtgaagaaggcttgggcaaccgactcagcagtgtatggatgcgccagggggatgaagtggcagtacttgctgaagcggtcgacgaccgtgaggatgacggatttccatcctacgcgcggcagtgcctccacaaaatcgaggccgatgttggcccagacagccatcggtaccggtaggggcatgagcagtccagccgggtgaagatgttctgacttgtacctctggcacgtggcgcatgccttgatgtagtcctgtaccattcggcggacgttggggatgtggaagtcgcgccggatgcggtggatggtgcgctgcaccccctcatggccgtcgtcgtggatggcagtcagcaactctaggagcagtggggaggacggtggtatgtatagacgtgcgtcgaacgccaccatgccgtctatcagtgaccaaggcgccgcgcgtgtgccggcttggatctcatcccccaaggccctgatggcaggatcggtatcctgtgcttgccagagtcgctcgacatagtcgaaccgtggcgcagagatggcgaggatcatgccgtcgtcggtgtcgcgacgtgagagggcatcggccaccgtgttcaaggcacccggcttgtattccacagtgaagtcgaacccaaggagcttgccgacccagtggtgttgtgggatttttgcgagacgctggtcgaggagaaactttaaactgtagtggtccgtgcgtaccaagaaacggcgtccccacagatatggccgccaatgcctaatggcatggacgaggccgatcagttcacgttcgtatgccgcgagagatcggtgtcgaggtgcgaccggcctgctgaaataggcaaccgggtgcttgtcttggatgagtacggtgccgaacccatgggacgatgtgtcgcattcgacgacgaatggcttggtgaagtcgggcaaaaccaggaccgacgccgatgtgatagccgtcttgagcgcctggaatgccgtggtcgcgtcgtcgttccacaggaacccctctttcttgagcagtgctattagtggtgcagctatggtgccgtagtcgcggacgaacttgcggtagtagcccgtcaagccgaggaagccgcgcacagcttgaacagaccgtggttggggccagtcacggacggcctgtaccttggcgggatccatggcgacgcaggactcggtgatgatatggcctaggtaggagatggaggagaccccaaacgcgcacttggaacgcttgacgaatagccaatgttgttggagagtgtcgaggacggcccggagatgtcggagatggtctgcccacgtgacactatatatgagaatgtcgtcgaagaagacaaggacgaaccgatgaagaaacggccgcaggacgtcgttcatcaatgcttggaatgtggccggcgccttgcaaagtccaaacggcatcaccaggaactcgtacagtccgtcgtgtgtgcggaacgccgtcttggcgacatctgctggattcatctggacctggtggtaccctgaacggagatcgagtttggtgaagaacttggcgccatgaagtttgtccagtagttcgtcgacgaccgggataggaaaagcgtccttaacggtgatggcattgagggcggtagtcgacgcagaaacgccacgtcgcgtcggctgtcttgacgagtaggaccggtgaagaaaacgccaaagagctccgacgaatgatcccttgctccatcatgaccttgcactatcgttcgagctcatccttgtgtgtggccgggtacctgtaaggccgaacagccaccggctgggcacccggggagaggacgatgctgtggtcgcggctccgtggtggaggaaggccttgaggctcggagaaaacatcagcgaacgcgaagagcagtgcgtcgagcaggttgtcgccggctgtggtggtgtggagtgatgtcgtctcctgtcctgccacgccctgccagcgaacttgacggtcgctgcgccaaaatgacatagtccgggaggcgaaatcccagagaatcggccccagagacgcgagccagttggtgccgaggacgacgtcatagccggccagcggtaagacgaataggtcggccgtgaaggtgtccccattgatgacgacgctgcttgccagagtacgctgaggcagggaactcgctccccattcgcgacggtcaccttcatgcgagcgcgtcggtgtagcgtcatggccgtgcgtgcggctgcgtcctcggagatgaaattgttggtggagcccgagtcgagtagcgccaatagggtcgtgtcgctgatcttgatgtgcagctgcatggtggcgctgaggcggatcccgacgatggcgtggagggagatgtgcggctcgctgtcgtcgtcgtcttgagactcgtcgtcggtgtcgtctgcagtttccagcaaaaataggcgctagcataccttgttgtggccgcggccaaaattttcgttgcagttgtagtagagaccgagtcgacgacgctcctccatcttggtctgtgacaggcacttgacaggacggccttccacgatggccgtcggcggctgagcgtttggcgcaggcaaggcgagacgtggtgccggcggtgggagccgatctcgttgttgtcggactggtggtgcggcgcattgcgctcgcagctccagtttgcgggccaaactcatggcgtgggcgagcgagttgggattgtgaatctcgacgtcgaggctgagcggaggttgtagtgcagcggtgaagagctgcaccttctgtgcttccgtgaggtggccggcgcgtggcagcagcgcctcgaaacggtcctggtactccaccacggaccctgtacgcttgcaggctgcaagttcgcccagggggttggaatggagcggcggttcatagcgcaaatgaagtagctcggtgaagcgacgccaagacggtgtgccttcctctcgctggacttgtatgaaccacatttgcgcaccatcctcgagattgtacgaagccatccataccttctcctcctccatgacgtgttgctggtagaagtaggactcgcatcggttgatgaaggcgagtggatcagtcttgccgtcgtaccacggaaagtcgagcttctgaaaccttggcggtcgatcttgggtgtgttcgcccgagcttgtcctgccgcttgtagacccagtgcactgattgttgaggagttgaatggcctgtgagtttgcctcgacggaggcttgcagcgacttgatggtggcggtgagggcttccagtgatgcttggatagctgcgtctcccatggtggtcgatcgctacggcgtcgttggagcggaactggagcgtggtggctgtggaggtggtgtagcgcggcgcggcaaggatggcctggatcgtgataccaagttgtgatagggtagctggccctcggctacagagttcgtagccacgcgccgtgatgttgggcgaggttttccccctcagcaccgatagacagaggcaaagaggaagaatagaaagtttgtgatcaactccatttcttccaaattctgaatacaaaacttaagtaggctctcgggccttaattcttggcgctaatcaaatcattgtaactaattattcctattactaaggatctgattgatccttctgttttcaaatccatgcgctaatcctgcttagccgcgcgtgatcgcgtatacggcgtcgacggcgcgccttcagcgcccctgatcttgtggcccttccttgtataggtgcggccccacatgacatccctcaccactaacttacctctaccttctcccactttccaacggcgaccgacggcgacggctcaggagatggagaggcgcggtggcgggcgtcggacccaacgacgggtgcggctgtgaaggcggtggagaggtgctcgtgcggccgccggatccgaagatggggatccgcaagaggctcggcctctagtggctggatccgtcgccggcaaccgtttgtagagtggatccatcaccggccaccacagggagggcggatccatcgcaggcaactgcaaggacgacgacggccggcctcgggcagggtgaagatgatgacgacggctaggttggcagcagtggtctcccgtcaacggtagcaccgaaaacagtgttagatccgccgtcgcggggcctcgggcggctggatccgtagccggcgaccacagggagggtggagctgtcgtcggcgaccgcggggactaccacggcgggcctcgggcagggcgacgatgacaacagttctgccggcgacaacgggaggtgcggatccgcggcgacgacgatgccgaggaggaggtggccgggagcggggtcctcggccccacaacggccgaatctgcgccgtccccgccgatgatgaggaagaggcgaacgggagcagcgccaccagcctagcgcgcacgtgcgctgaccagattcgcgcctccgccatcggattcccagggttttgatttttttttatttttatattttttttggatttttagttttccttccgggcgacataagcacccgcacgcgaaaatccaattttcgcgtgcgggtacaccacccgcacagaaaaatcagatttcgtagaccttttggcacagacgggccaggcttccacacatgaaagtaggttttggctcgcacagaaaaattgtttttgtactagtgtgccccccagctcagtaacgcatgtttctccatctcccgttctgcgagaaacagaaaccaccgccgcaaagttagaagacttcatggctgtcatcaagacagtggcatcatttcctcaacttcaagaaaccatattttctccacatcatgcccctcacatttcttctactaaggttctgaataaattatatttttagttttttactgctttgaccaagttaattgaggttctaaatgtagagataaaattatgaaaaaaaataccagtgagttgcagaggttgagtagcatttgtatgaatttttacatgattttatcttgcaccacttacttttaagattttatataggcttgacattacatatatgttttattgttaagatgcaactaaatgctaaataaaattataactagcttatgtatgaccttagatgttgttgttatgcttgatttctatctttcatgttttcataagttgcatgtatgcatattttgtgtcataataaacaaaggttaaggtgaaatatgaattatgtatgagtaaatgtaattatataattttgtattcatgagatgtattcaggtgaattgccaatttagatgatggattctaacatatgtcatgttgtaattttaagtcataataattttaggaaatgattttccatattagatgtagggtcatttactttaattactatgtgatactccgcactttgctgcagtattcatggatgagtatacgttaaatattgtcgaaatgatgaaagttgaaatgttgagaaaataatgtgtggaagatgattagatgcatacttgttgatctctataatataatattgtaaatgatgtgtaattgttagtgagtgaagatgtagcatgcttgcatggattttaaatgggtttgaatagtaattgctagtgggtgatcatgtggtatgcttgcatgttgaggtttagcttctaataattgttagtgtgtaccaactatattgaaacaatagatttgcttctagttttaagtaatgcacacgagacctattatgaagtgcatttaaaatccaaaaacacacaaagaactcaaatcacaccaaaacaatcatgcaaaaaatgcaagcacactctatgttttattttattctagaactgcaatggaaaggttttaagggcatgttcactttgatgccattttcaaccttaccaaattttggtaaagttaacaaaaaaaaagtggctacatttagtttgcagccaaattttggtaactatataagaaatcctaacaaaattttggcgagttgccaaaattgccaaaatttggtaagatttttttggcatcaaagtgaacaggccgcgcttaaggtttccggtttaggtggtaaacttttaggaaattacctaagaaacacacttttggttatgttacatccgatggcccacatgtcattctaaatcgtctgaatttgagccaatccactgccaaccgtcataggggccaacctataatctactaggaaaagttagtggccgaaggtggtggaggtggttcggccgaaccagccttggcggccccggctgcttccttgcacatggcagctgcccattagttggtgatggcggttgtggatgaaccgacctccacaaccgacattccaacaataattggaagctataataggataagctcactcactttccaaatgcacaacaaagtggagtacaactcatttttatattctaggcatcactttagtatgtggaattaggtagagagtgagggggagctccggaaggagtgtcccaaatgttgggtttgtcgacattcttccactggagtttcggagaagcactgaagttatcggctttcttctctcgcttgtacctcgacggatgctctttgaatgaagtaagtattcgagacgtctatatggtatttaatttatttgcttaagtgacatatattcctatctttgcgggttcctcgcttagtattattattgagtgctttagtactaggactcttaataaagaaggaagttcctgcacaatatagtagagtagtaatcaataacttagacatgctatctaggttagcggttatcttcatttgttgcgtactccacggaaagtgaagtagacagcaggaggtgatagtcatatccttcaatgttcaagtacattatagagccgtagtccggactctgcttggtagaccgggggagtcggtgcctgaagccatcgatagtttagtaaattaacccataggaatcatctatggcctaaacctaccattagttgttgtacttagataaagtactattcttacgctatacacatgttccctgtgaattaatactcttatctcttggaatactctaaggtaaggtgctacaatggaatccccatgattcagtacatttggaatactctgaggtgaaatgctacaatggaatccgtgcgcttgctgatttatttgtgagcgtatcaagtaccaacagtggtgtgttatttttgtattctgtgtagcatgatcctattctggtctagcagagggagagggaattaagttggggtcccaacaaaattgccttcaaattaaagtttgtggaatataccatcaagtagaacttgcacaccagtagcttaattaacttggcatacgagtagtatttataatattgaacggaaactaaacaaattaatggccgacaattaggttcgcggcgtaacaactagcgtaactgatataagctagtatcatatatgttgtcgaatagcagcagtatgtgaatcagaggcccatgcagtgtgaggttgggtggaattagagcctctcgccacgaatcctcctggcaagctgaacgtccttggacatgatggtgacgcgcttggagtggatggcgcagaggttggtgtcctcgaacagacccaccaggtacgcctccgccgcctcctgcagtgccagcaccgcgtggctctggaacctcatgtcgtgctgcacccaccaaaacatcgcaaaaatcaattaacgtacatacaagcatccttagaatagaatgaatcgatcgacataatttaaacgtttggttaccttgaagagctgtgcgatctccctgacgagcctctggaacggcagcttccttatcagcagctctgtgttcttctgatactttcggatctccctgcagttggagcaaaattacttcagtcttcatgagggttaagcatgtgatggtatggaaaacattgctctgaaattttcctcaaacaatttgcttcatcagagttcgatcgatacaacagaaagaaaacgcggagatgctggattgaattctattattgaaataaaggaacaaccagcgtgaaattagacgaaaaaaattgtgaatatgtatatacctaaggttacatacctaagggctacggtcccaggacggtatcggtgtggcttcttaactcctccaatgcacggagcagacttacgagcggcggcctgcatgtcgatcgattgtaatatatatacatcaacgcacgtgttggcaagcgaagcaaaaaaaaattatgttcggtaaactattaaataatgtattgtggaggtgaaggatatattgtacatgtatagcagcgacgagttgctttctaggcgcctttcctcccgtggacttgcgaacaatctgcttagtacgagccatcctgcagcaaaccatgcgcacgcatacacatatatagacaagaacattattcacacgttggctatatacaatagtaatacatcggctttcaagactcttataaggagagcaagcttttttttcatcgcacggaggggaaaaggaggggaaaagagatttatagatgtcggttttaaatgaatcggtttttatgaaccgatacatatgagagattttatagtagtgaagttagaatggcgagagagatctgaatttataaaccttatcccaagaccttgcaatgttcgcaataatactacccctatatatttaaataactttttttggtacttagcgtgcaactttaaccactatttttgaatcaaaacataataataataataataataataataataataataataataataataataataataataataataataataataataataataataataataataataatacaaaaaatattataaaagtaaagcaaaaaatataaaaatctacccatatgatttttagttatgttttaaactaagtaatttgagagctagattgttgaagtttaagaagtttaaccgagtaaactcaatattgtcacatatttttatacggaggaattagccactcgttcacaaaattagaatggacacattacctgtcgagaaaagataaaggcgaatcctacaaaagtatttactccatctatttcaaaataagtttatttttagtcttcattatttgtggccaattaaatgaacctctatcgcttcgtctagttacctatccaccatttttatactatttttttactagtagagttattttggatagagggactacaaattagtacaattaaaaagatgcatgaaactttgcatcacatcaaagagctattgacgaagcaactatgcttgaataatcaataagtcaaaataaagctaattttgttataatatttgaattgagaactaagaatataaaacaccaagagaaactttatagagatcttgggaagctaacgtgtgcggaagaatggatgataactcgtacctctgacagttcgagggcagtaaccgctttgctcttcagggatggccgactactgatctgtttcttggtgatccggacggagaaagagggcaatttataggcagtcaggagggagggtttaccatcttgtgaaccgacttaattactcatgagcctttaacgtggggtcgtttgattgccgttggtttgatcggacggctaagagggttcgattaggtggtggcacggatcagtggtgatacatactgccctcctattggctgtcgctagtagcacaaggatccctgtgtagtaggggtgaaaacggagcggatagtttccgtccgctccggtcaaaaacggatacggatagtgttcggagcggatttttttcggatagttcgaatacggatacgaatacggatattttttctccggatacggatacgaatatggtaacgcagtttccggcgaatacgaatacggagccgaatatccccggagattaagatgcgcggatatccgcgtaacgcttgatgtctctccagcctccagcccatcccttcaatttcagcacatagttttctctcggctatctaaaccctagctgccagatgggcgacggcggcggcggcggtgacgacagcagcggcaagccggcgacagtggcggcggctgtcttagatctccttggctccttgctggagttgctgggcattggccttcaatccccctagtgcttgtttctgcttcctatctccctaaatcgtgggacagtgggaggctaggagccgttaccaccgccggcggcaaggcctcttgcatgcactaatctcttaggtaatccattgatttgttcttctcctgtaacctttgttttgtgcctttcatgagatcgataaactgatgtagatcttggatgtgcttttttttactttgtgtctagattggtgatggagtctggtagtgcaagtagtgcaagtgcagctgcaagtaccactgcatcatctccagttttgcaactcccagcacctccaagccatgctacggcagctacgcaggacacttctcctactgctggtgccttggcacacaatgatgcaattgatttgacaaccaatgatgattctgaggttttacctcctcctggtaagaagcaaaagaagtgtagttctgaagtttggcagcactacactaaatataaggtaagcaagaaagggtcagatgacactgtgattgtagaggagtatgctaaatgcaacaagtgctcatataaacgtcggtgtgagagtaattgtggcacttctgttttctggaatcacttgaataacaagcacaacattaagtcaggtcaacaacaactacagatgaaaaagagtgaagatggtactgaaagagctgttgagacatacaggagctgttgagacatacaggtatgatgagacggttagcctgaaaaagttctatatggcaatcatcatgcatgagtatccctttaacattgttgagcatgattactttgtggattttattaagtctttacgccctacttttccaattaagagtcgcattactgtgagaaaggatattctaaacatatatgaagaggaaaagaagaaattgtggcagcatttgcttacactctcatgccgttttagcacaaccatggacatgtggacatctaaccaaaataaaagttatatgtgcatcacagttcattggatagaggacacttggaacatgcaaaagaggatcattaagtttatgcatgtagaaggacatcattcaggaagtaatatgtgcaaagagttttatgacaacatagttgattggaatcttgatagaaggcttgttggacttactttggacaatgcatcgtctaatgatgtttgtgttaagggtgttattttaaaactccgtaaaatctctcctttaatttgcgatggcatcttctttcatgtgagatgtttcaatcatatcttgaaccttgttgcacaagatggtctgaaacaaatcacaggagctgtattaaagatcagaaatactatttcaattctaaagcactcgccactgcagtttgaggcatttcagaagtgtgccttggaagttagtttggataacacaaagggcctttccatggatactcctacaagatggaactccacatttctcatgttgaagaatgctatctactacagaaatgcttttgataggttgtttcttcggcatggtagaaagtatgcaaagtgtgctcccaccaaggtagactggtctatggcaatagcactatgcaagtgcttgaagccatttcatgaagcaactgaactattctctggtactacatatccaacagcaaatcattttttcggtaagttttgttccatcaagctttatattgttgattggtgtaacagtacagatggaacaataaaaaccatggcaaacgccatgcaaactaaatatgataagtactgggagaagtcgaatatggctcttgctgttgcatgcttccttgatccacgttacaaaacaagttcaatagagtactatggtatgaagatttatggtttagaagctgcaaaaaaatttgatgagttcaatggggttatcaaaaaattgtttgatgtttatgctactagtgcgtgtgcaacatcaaagaagaaaggtgctgaaatgcatgtgcatcaacttcaaattcaatctgatcctgttcataatactgatgagtttgatgatatctttaatgagaatgacagtagccatgatcatgagcaacattttcaaagatttttgcttgagagaagtcagccaatttgtagtgataaaaccgagttacaaatttacatggaacaaccactgttactatggacttccaaagatccatttgatattttgtcttggtggaagctcaaacaagcagaatttcctatcctctgcaaacttgctcgtgatttcttatgtattcaagtgtcaactgttgcttctgagtcggcatttagtgctggtggccgtgttgttgatccatttcgcacccgtcttgatccagaggctgtgcaagctttagtttgcaccaaagattggattaaagcagctaacaatggtacactttgtgtctgtgttcattgcttatttggccattccttcttgtatatatcaatatatgtatagctgatccatgatctgatctggcatcattcttaggttataagactcaggctatcatcaatgagttggacattgaaagcgtagagaggcatctggcaaacttattgatagtggtgagctattttcttattttacctctatgaatatttttcttaatataacaataatattattcgactcctgtaggaaaaagaggagaataatgatgacatggaacaggatgatgttctgatggatgaaatggatgaataatgatgttgcaattttcattcatcggactgcaagtgtactgaaaattgctttgggctgattactattttgatcttatctgtgttacctatagaactcgaactcaatatgtgttgaacttttcaacgtgtttcgatttgaacacgatacactttgtttaatctgtgatgcgtcctacaacgatgatatttatattaaattagataaatatatgtggtgcatttgtatctacgagcagtttgagtggtctctatattccgagaaatattcgttttcgtattcgtgtccgatcatattcgatccttattcgtatccgcgataattcgtattcatttctgtatccgagttattcgtattcgtttccgtatccgcctaacaatatgaaaacggatacggtaagagcattatccgtccgtattcgctctgttttcacccctactgtgtagccctcctattggctgggtacgtagcttgtcgaggaattatgggatctccatcttcaaaaaagttgttttcctttttttttatcgtaggctatcgagagagactaattaagatattgcatacattcatacagaacaattgtgctattttataccctataatcggtactataggtgccggaacagctaaaaccacctgtaatgccttttcctcctccgcggactaaaaacacataaaaccggcacatttaaacaaaccataggtgctggtttttaaaaaaccgacacctttaatataggtgtcagttaattacaaacaaacaacattcataaattcataaattataggagttggtttttttaaaaaaaccgacacctacacccaactgagccgaactggtgagctaagcatcggccttatccattccacacgtctttatctctctcttgtctctctctctcacctctctcgcttttctctgtcacggcggcggcccaaggaggtgctagcggtggcggcctcaccctccccttcgccagatccagcttgaggggggtagcgggatgggaggcgacggcggcctctggtgatgacggtggcggcagccgtgccctcccctccaccagattcggtgggaggggaagcggcggaccacggtgatggcagcggcagtggttgtgccctcccctctattagatccaacaggaggggaggccacagtggtctccagtgacggcggcggcggcgcccgcactctcccctccgccagctccagcgggaggggagacggtgcaccttggcgacggcggctgcgccctcaccatgttgcaacgatggcaagggtggagaaggatgtcggctgccatcgtcttcttgatgttaatctttttaatgttcatcgatgttgttgatgtttatgtgttgatgtgtgctttaatcttgtatgtattctttgatcttgtcgagatgaagtggagctgctcgatagatcggctcgaatcgggccgatgcattgagtcgttttttctttgttcatggaacctcagaggtgccgactaatgtgtaccggttgaaaaaaccgacacttttagctatttctgtactaatgaatattcatcgtatttctaatgaggtgtgagacctaacaaactaattagatgaagatatagtgccttctagtctcccatcttttcatccctatcaaatagccttccttctaatcaaactggcacctcatatgtatgcatgcagtgtggtcataaaataaggttatattctgataatttgtgtatgctgctaatccgcctctaatcttctagaaatgtaactgttctgggatggaggtagttaataaaaaatattaggattcagaaaataatgttagtatgttaaagcactttcacatatgcaatgtggtcataaaataagctcataatttgtgtatgttgctaatttatctctaatcttcttgaaatgtaattattctgggatggaggtaataattaataaaaaatattaggatttgacatcagaaaataatgttagtataaactaaagacgatgtgggatgccgtagagacaagacggtccggggtggcacctaagagtgagaaggaggagacaggcgggaggcttgtgcgatgaggaaggagcggggagccgatctgcaagggtgagtgggctgacgtgatggggccacggcgtcatgtagcgaggttggtggttggcaaaagaggacgtgtgaaggaaaaggtgtaggagattgatttgcgtatgtgtagatcgaaactgagtgatgagcacgtgcgtgattttctacctgggtgaccctgtgatggcgtcatagtggagaggtggggggtggtagtctgcgaggagcagcgatggcagcatagtagagagcggcgggcagcaaggtggagacagatttgtgaggaggcatgatggcggcatggtggagggtggggtgacgtggtttccgggttggtgcaatggttactgctagagaagatatgggagtgaggaggggaggccgagaaaaaacatggctgaattgttggatttggtgattttgggatgttggatttatttaatgaatggatgaactatacggatacgtataagatacagtgtatgtaagatgaatgatataatatgtaaatttaaatctctcatattatatcatgatagcacacgagcaccggaatgaagactacaaaataacacaggagcagaaaaaataacgtgtatatacattcacaaatataatttaaggtcattacatgtaaaaaaaaaaaaaagccattctcatttcaaggctccccacctcaaacctgaacctctggactcaaaacacgccaaggggggcattataaatacgtcctttgtacaaacagctaataaatagttaatttacaagcgctaaacaagatagtaaacatattaacttagagagcaaaatgcatacttacaatatgaaataattgcaaggcgtcttgcagacagtgggcagtctcctccattatggatacgagtgatatgactatgcttgctcagcttcatccggccttgaccacgcgcagtcttgcacgatgagattgatgcctctgacccatagctcgacgctggacgcggaggtggcctcgaagtggatctccctcccggtcaccgtctccaccattaggatcagctgctcctcgctgcccgtcctgatgatcctcctgttcctcctgaacgccgcgctgggccccgcccgggcctccctgcaggccacgttcctccggcgggtcgccccccacgtcagcacgccggaccgcatcatccgcaccgccttgcggtgcggcggaccccggcccccgcgcgtgtgcttcgtcagctcctccccggcgagcacgtgggcgcgcgccacgtggtccagcagccactcctccgtcgccttgttcgacctgccgctcctcctcgccaccgacagcgccgtctcgctccccgcgtcggcggcgccgccgcgcgacaccagcgccctgcacgcctccagcttgcctgcggcggccgcgtgcatcagcggcgtgtagccatcctcgtccatcgcgttgggatcgtggcccatcttcaggagctgcgtcagggaggaggtgtcgccgatccgggccgcgtagtgcaggggtctgaaagatggctgctggcctgcgatcgcatccgcgagcgaagcctggagtaagatctgttcgaaccgatctctggtttcaggagctctgcttcggatgatcgacatcgcggatttcccttcggcactcgtggcagcgatatctgcccccgccatcactagaagcctgaaaatgtcagcatggcctgactctgcagcaaccataacaggagtgagccctgaaccatcaggcctgttcagatctgctgctgagtagtgtagcgtcattagaagagcttctgcactgtcacttgcagcgaagaagtgcagcggagagaagacggtgatatccgatgaagtgatgcagcctccgcaactcaatgctctggaaagaatgtcgatgatggttgagctaaatgagcttttcttagcaagcattattgctgtgtcacctgcattgttcactatcccaaggtctgcccctgatttgatcagttcaagaaagcaatcggagtgtccacacctcgcagagaccatcagaggagtgtccccagtagaagtctgcgcattgatattagccccatccaacatgagttgtttcagtacgggcgcatgacccaaccttgcagcaaaatgtattgggtaggagacgtgtgtgccgtttgtcatcattatgggaaatctgggattggcaccagcatttagaagcacgcttactgcattcgggttctgacagagtatggcatggcaaagaagatttcgacccttgcgtggggtttccagcaaccatggtgctttatcgagcagcaatttgaggatttcaccactgcattcgtagtactctactgcacaccaaatggcgttgtatttttccccaaggcatgcaccaacacgaagttcttcacccgttgcagagtcccaacaccaagaaccaacttgcacaagacagtccaagtaagagccttcctgcacacaaattttgatacaagtatcattctaagaatgtggaaacattctaaattagcatagtactcataaataatgtggaaaattagactgcctaaaatttcgtttactgaaaaagggacggccagtgcgtttagcatactggagtggaaacaaatttggattgcttggcatacagaacataaacttaatgggaaagtagtcggagaaacaaaaatcatccagacataatgcatccccacttgtcatatatatggctgccttgaatctacagaaatggttggaattgttgcaaataaaaaaaaatgggtattattagataatgagtttttcttcaaataaaaacagtgagttaagtaggaatggcaatgcacaactaagcattgtgaacagagtactacatccatctctgtacctagactaataagaacgcttaaaagatattcagttattgcagatacctcaatcaagagtttcacagttgaaatttgccggctcattactgctgccaccagtggagtgcaattcacattagcatgtagtgcaggcttaacagacctcaagaggaccctagccatggaattaacgtcaaccccattctgacaaaatgaaagtgaaccagtaaacacacacatatatatatacacaagaaaatgttatctttgtaactggctgtatataactgatatcatttgatcagacctgcagtagtatgaccacaacatcatcaaagcctcttgaagaagcagtcaccaaagcatgtgctgcagcttcaggctgtatcatctctgaacagactaatagccgaacggcttcagcctcagcaaaaagagcagcctctgatagggaatcttcacaagcttcccgagtgactccagcctgcagaagcatctctagaatatggatgtttccttcacgtgcggcagctgttgttgcatagcctagaaataacttttgattaacatcagctccagcaacctgtattcaaatatcaagtcaattactccatgaacacaattttagagtatacataattcataatacaatatatttactaagatactgaataattcccggctgtcctgttaagcacaagcgtcttcttttcgtcttctagatcttatctccttatggctcactcgtgccggcctatacatcattcgatcagtttttcgtcataattttcgtgagaaagcaattgtaatgttatcagatagtttgaacaaaccaactctagttagcactatgcaatattttcatcatgacacttctcataactgtttagaactgactgactggctaggtctgttaacctgataaacctgtctttaggcatgtctatgtcacatatatctagatactaatacggctccaatatatatgcaggaaacaatcgaatatctgtattatatgaaagaatctaatggtgcatgtggcttctaacgatgccatttatggactgatgaacctaaatcaagacaacgagagtacgagacaatatcagcattatgtcctcagtgcgacctcgttaaacctctacactgaacctagctatttctgtacctcaaataccgagcagtatacttttttacaacttgatacaccagccacctttccaccacctccactctaataatcagccttaaaattaaagctactgtagttagaaatattccagctatttatctctattagaaggccgcttaaaattgccaggtttgacattcctatagtatgctagctatctcgctctagtataaaatctcattgcaaacttaggtccctttttttggcttatcatgtgaaggttttcccaagttcttaattaatggtacgttttcttaaaagtttttctttaccagcatttcttagaaaactttttttagatgaacattttaatattcaattcattcatttgtgcgctggaataattgtcataaactcaggtttagccatcatccatcaactatatcaaacggaaccgtgcacctgatacatatcttattgtgcggttcctgtattagcgtataaaatatacatgcatgttcaatatacgtgtaaaaaatatatctactattatacttcatatgccaaataagaaagccttaaaaccgcttacatggctaccttccccatgagctctacgaggtgaggtgaccacacgggactccgcttactacctttttagaacattatcatctataatattaaagcacatggataacaaaaaatatttccctctaaaaattgggcccactttctcagtaaaatcagcttagagttaacaacagtaaaatctgataatttatatatagcaaagcttggaaaatatactactgagaaattgcttagcttcccaatttccaaatttcgagaatgtgctcaaggtgagttgtgatgtatctcttgtgggcattggacctgtggtaagtcaatagcaagatctgccatcttctcaaggacactgttgaatgcaactactaatctacctaactttgtaaggggcttcacagaacaggtccaaggaatcccatctgttttgtatcacatcaaaggtttgaagtccacttcaggcacttgtatagtgggggcactaggaaagatttgagcatcggaacaccaccaacatgaaaaaactcataaaacaacatagcttgtgatgagaaaaacatttttcattaggcactgcagagttttagccaaggagtacatgctagtcaaattaataagtgatatagaagtttcaaagtggaaccgaagccatcacattcttgtcttgaaaacaaccgaagaagattatccatcccattccagaagggagagcagttgccatcacaccataccaaaaggtgtaacaagattacccatgtccctaatcctaactcaattcagtgatatgcattggcaaacctgctaatattctataaaccaccattagaatagactgataaatctctccactacagtaataattttaacaggaaaagaaggggatctgcaacagccattcgtttgaatggttttagtttattcttaataatttagatcagaaaacactcattcataatttgtgcgaatttattttggattactatgaaagggtacaagtcatccagaatgtttttttactaatcattacttccaatttattcagaattccctccgaacgtacctactgaacaaatttgaaaattttgtcatgacagacaatgcgcacaaattatttcgctctaaaaatatttggtcagatgattaaacccttggagattgaatgcgaggggattcaaatcttggaaagtgagagaaatgaccagtctgttgacgaaaatttggttacgatccttaccaggagggtgcgaacaacttcggcatgaccggcgtgcgcggcggcgaagagcggcgagacgtcggtcttgagctcgcgggactccacgatcacctccccggccgcctcctcgcggagggccacctcagcgcacctcacccgcaggcgcgccaccccgacgcggctcgccgcgggcacgccatcgtccgtgtcgtcgtccgctgcggcagcggcggcggcggccgccaggcacgcctccatggtcaccacgtccccccgtagggcagcctccacgagacgctgagcgggcgacgcctcctcctcctcccgcgccgccgccgccacagcggccgccctgcgccgcgacatggccgccaagtgtgggaggcggcggcggcagcggcgtctaggtggtggcgctcgccaggtgtttgcggtgtggtcggcgaggagagcgaggaggccgctggtgctgcgtggctgccaacgttcgggtggcgaggcgactggcgagactttggggagtaggtggaattcgaagtttgaaactagtcgcactggtataaaagtgcaaacgcgtgattttctgaagtaaatatctgagtcaaattgtttttgttttttatttcttgaatattatttttaaaaacaagccccgttcaggtctagaagcttttactagtgttttttttaagcaatttggcacgctttattaatctgcaaacataattacatcgttcactataatgttcagctagaaaattggagtctcatcaatccaattataagaattcttaaacttaaaagtataattagctacaagcctacaacatgtgccacacaatttgcttccctattacaatgctcaacagagactttaacaaaatcatatatcaaaatctggcattcatataaaattgccgctgccgtagttgcttaaaaacctccatcttgcatcgtctccaccacctgcaaacaatctgattgagtaaatagtactccctcattccctaaatatttgacaccgttgacttttttaaatatgtttgaccgttcgttttattaaaaaaaacttttgtgatatgtgtaaaactatatgtatacataaaagtatatttaacaataaatcaaatgatagaaaaagaattaacaattacttaaattttttaaataagacgaacggtcaaacatttttaaaaaaatcaacggcgtcagacattttgtgatggaggtagtatcttgacaaccaatctgctgggcgaggatgagtccatccctgaggacgtaggcttctgccattgctgcatcagcaacatgagacaagtacctacaagaactagctaaaaaattcccttgtgaatctcgttgacagctctggttcctcctgtactcgagacgatgtcaaaggaagcatctatgtatacgagaattccttcaggaggtttatgctatccttcccatggttttgcatccgactttttcttcgccatcttataatttagtgttagagcaacaatagatctagcagccatctgaatcctttcaccattcactacttgtcttctttcccaccaaatgtaccatccccctgttaaaatcaattcagcaaagcttttaccagtgtttctttcagaacatgtgccattcggagtgagagtttcaaacttatagtccctcgttttctttgtacatgcttctcaaaatgctaaatgatttttttagaataaaatagaaaagttgctttcaaaaataatattaactacttttaaattattttaagctaatacttaagggactacttattgatctttcaagagagaaatctttcaaatttttcaactaatggatacaatccgttttgaatgaaataaaaaaaagataaacattgatgaggacataactagctcggatataaccatgaataccttatgtattaatcaaataaaggtgcatatgttctacattagatttacttgttatatatttgaacaaaggttgctacacagtgagttttgtgtgttttcgtttgcagaggtatttgcttgggcgaaggaaaagagaccgagcgtaactaatgcatgaatgattaaagaagttgattagggaccaaaccaagaacttctccaagtctacttctacctcaccacgtcacttttggcccatagaagacaagaaatcaagttgtacacgttttgtattcggattcgggcctcctgacagcatcaacttcaaacggacctagccactgatatagaaggagtttcgaggcccatgagtacttgttgaaaaacttatggagtctactttcagatggttttggtcccatgtcaaaattcctaccaaaactgccgggaatctgcaaaacaagccacgtacctcatccagtccgaatctgatttgggtgttgggccttgtaactgtgtcgtgggcttagcccaaggaggtgtgcgccctaggacaaccctagtacgtccctaatcatattaaatcagtagctgtcatcgtttagagtcgggttttgcttagattaatctgttaggaatagtttcgccgctacatcggtttgtggaaccccaaattcgagtgtttaatcatccatatgcaatttggttgcaatctatcttgttcttgcttgtgttcttcgattcgcatgcagggattagccttctcggcgaggtcaaccgggtttcggcatggttgataaccagaggagacgtggtgctgcgattgcgggactcagtagcatgtttgttcagaagccggatcgagttatgttgcgattccgcccaaatcgactgtttatcaatagctatcggaagatcgggacctaacaccctcatcagttggtaccagagcgtggttgcccgttaggtaatttatcttcccgtaaccagaaaattgccacacaaaaatatttattctttacctagacaatttgagccgttgcattgttctattagattttgcgttgttgaattatagattgcatcgtcgtatcgagtgctggtttagttttagatttaatttttagttttgagtattgcatctgttcatcactttcacttaggtgtagggttcgtctatgagttgtacgtcagttttgggtccagttttgtatttcgtcggttgttgccgggaccttgaaaaattgaatcgtctcgtcatcgagattccgtttttatacttttgagaagttttttgtcggtcaagtttggagttgcggctagggtttgcgcttttgccgaatttccctttggccgtacccctccccatctgcaactaccacctccccctcacgactgaccacctttatcacattgtttggtattttggtggttgtagatttgagatatttttacaaaaatggaacctacatgatgtgagcattccatttttgaggtgatctaattttagttttacactttgcatttgagacccctgtaatatttatatttacatttgagtccttcttcgaggtcagtggttcaattcttgttgaaaaaaagtaaaaaaataaaaaaagaaaagacagaaaggtgcaaagaaaaaaaaagaaaaaaaaagccgcacctaaaaaagaaaaaaaaaggcataaatgtgcttaaaaaaagccgcaccaagaaagaaaaaaaaaccattcatccttggagtatgttttcagagtgcagagttgtgcattgattcatatatagtccttagtgttgtcgggtgcttgcttgagctagagttgagtctagactaggccagcacattgactagtactttgaactattattcaactttgcattttctgattagtataattgcgttcctttgctactatatattgtgcctcccaagctccatatatattcttctggtcagcaccgctttgatccttacaatcgccacatcacgttcttcaaggtgtcacaaactagccactggttgtaccatccttagcattgctggtaagacacttgtaagagcttggtaaggtgctctatttggctgagttgttgaggggcatcactacaccacgtagcagattattagggataaccttcattgtttgttgttgtttttgtgtttgcaatgatatgtatgagtggcgctcaaaatcagtgataccaacaaggtgcacgtgatgatagtactttggtgcaacaagtgctaagttctcaactggagaaagcggagcaatggcagtaccacgaattatttgaaacaaagtttgtggttaaggatagagcatgttgtactgtaatcgatagtgagagttgcaataacttggtgagttcagatttggttgagaaacttgagttgcctacacaaccgcatcctcatccatattacatcaaatggttcaactcttgtggtaagttcaaggtaaatagaattgtgagaataaacttttcgattggaaattaccatgatactgccaattttgatcttgtccctatgcaagcatattctttgttgtttggtcaaccatgggtatatgatattagtggtttgcataattttgttgctaatacgtacacatttagacataatggtcaaaaaatgaaattggaaccaatgagtttttctgaaattttcgaagataatcttgaaagtatgaagaatggaatcgaagaaaggacaaataatagaatcgatgagattttcagagataccaggaataatactaatattgtgaagccttcaactaagtctgagttattacaaaacgaatgtaatgttgtgcctattgttttggatactaatattttgcaggcatctgagaataaccaaggtaatgagaaagagaagaaagatgaagaggaaaaaagacttatctatagctccatgcatgcttgaagaatgttcaattgaccaagcactgataatttctgaagatgagaaaaaaggtaatgataatggtgctacagctactcaaggtatgcatatttatgatgtgctaactatgtccactacttatgctacgttagagcaacccatagtggaaccgattgttgaaatacctttgtcacaaaacaatttgcttgatgtttcgtgtgataaagaagagttgtgcgatgcttcacttatatccatgccacaactagtgaatgaacatgttagttctaaagtagagccactatgtgttgagtttaaacatgttattcacatttctagcgagaatgaagagcttaaattgctatcttctttaaatacttggggttatattcaatttgatgatctttgtccactctactgcttagagaagaaattatttgctagatttgaattgccatgtccttctgatgtgatttttcatgttattggcaattattatagtaaaggagaatataatgtgcatcgagtatatatttgttcgaatttgactatacctccttttcatgatatgcattgtctaggggaccgcatgcgtataagtaattatctatctagttcctgtagttgtttaaatgagttacaggttggtttgcaagaaggggagtgttgtgatttttcgactacaaagattttaggatccaatcatatggttatcaagaaatgttcctcacccgatattgtgatagataaagatgagttcaatacgctccatgagaaggtgaaaccaaggacggtttccaatcaagaaggggaggatgatgaggacataactagctcagatataaccatgaataccttatgtattaatgaaataaaggtgcatatgttctacattagatttacttgttatatatttgaacaaatgttgctacacaatgagttttgtgtgttttcgtttgcagaggtacttacttgggcgaaggaaaagagaccgagcgtaactaatgtatggatgattaaagaagttgattggggaccaaaccaagaacttctccaagtctacttctacctcaccacgtcacttttggcccatagaagacaagagatcaagttgtacacgttttgtattcggattcgggcctcctgacagcatcaacttcaaacggatctagccactgatatagaaggagtttcgaggcccatgagtacttgttggaaaacttatggagtctactttcagatggttttggtcccaagtcaaaattcctaacaaactgccgggaatctgcaaaacaagccacgtaccttatccagtccgaatctgatttgggtgttgggccttgtaactgtgtcgtgggcttagcccaaggaggtgtgcgccctagggcaaccctagtacgtccctaatcatattaaatcagtagctgtcatcgtttagagtcgggttttgcttagattaatctgttaagaacagtttcgccgctagatcggtttgtggaaccccaaattcgagtgtttaatcatccatatgcaatttggttgcaatctatcttgttcttgcttgtgttcttcgattcgcatgcagggattagccttctcggcgaggtcaaccaggtttcggcatggttgataactagaggagacgtggtgctgcgattgcgtggctcagtagcgtgtttgttcagaagccggatccagttgtgtcgcgactccgctcaaatcgactgtttatcaatatctatctgaagatcgggacctaacaccctgatcaaacatatcaacaagcagttgtaaaaactaattgagtgagtgctctataactaatataaatgctttgtaacttaatgtaactgaaagatggatgtagaggaacacaaatcttgatgtaagatcctacagatgaaacattgaaagacagatggagtgcgaaaatctatcacagatgaaatagcaaaacctaatacttaattaatcgtgtgctaatccatcgctctattttacgtgcgtgaagaaggttcccatcttacactaacgaacaaagctgcagcaatgttaacatagcgagagtgtcgaagcaagataatgtaagcttttcttttcgtcaagagcattcttacacaacttttagttacctatattatatagctaagttcaccattgcctagcacagaaagttaatgggatactaacaatgaaagaatagttctcatcactgttaacattgctaatcctgctatagtatggccatgtacattattgctaatcctgctatagtatggccatgtacattatggttcgattgacataccaattcattatcaaaacaataaaacaagttgaagaatgtaatgtaaccacaaattaggctacattgcctagcaattcatcgtcaaattaaacgatgacatgggcatgcctagcaatgttccttcaaattgatccagactttctaaaaaccttgggataagaaaatcgtgatggatccaaaaacctgagatggttgagttgaagcgtagccttgtgaactttataattatggcttaaaccaagatcgtgttttaaaatatgctttaaactttggctttatgcaaaatgaaccatattataccactcctttgttcctgttggcacgcgaaattgatccgcgcaacaacacgatactaaccgtgcttacatgacgatcaccggagtctttccgagcaaagcaacaaagattcctcgctttcgtggaggagaaccgaccgttttccagcgcaaaacggcaaagatccaccaaaccctagagcttggcagtagagagaaaaagcacgggaaagagaaaacagaaatagatgaaaaactaaataagtagattgattttgttcgattggtccccttccaatcagccatgcacctgatatatatacagacgtgctccggtctttagcaaatgtattcggcccacgtatatagaaagtaccaagtagtgatcaattctctaagccgaatacaaaacaaaccaaatcaaacaatgccttatctcagctgacatacgtgccaccttgtattcccttccgtataagcttcggcgtcaaaacaaccagcctcatctctgcacgatccattggtcttgatatagcccaaacccatgttgttctgtgcatgatccaataggcccactcaactgcagcatacgtatacggaatcatacggcaaaaagacccgcataacatatatgcacctccatgcagatatacagcacacacacagccttgtgaagcagaccatcatgcatgaatcttccaagccatcaatctgctgctgctgctctccagataatagcatcatacctgcacttagaaaacaaaaccaaacttctaaagaatatattcaaatcatctaactactcattaaaaataatctggccatttgaactacctaatcggccaaattacattattaacacatgcccccctgtttttggtaatatattataaatttcaccaaaaacaccataactaatatttttctgaggatgatgtttcaaacaatacaccggccataaccatatcaagctccctaccatatactgggataatattttttcaaatatcttccattcaaagctttaggcaacttatccccctgcaaagactgcacaaaatatgaatttccaggaacaatctctacaactttataaggaccttcccagctcggtgaccacttgccaaatttgctactcctagttccaatgggcaaaatcgttttccataccaactcacctatctgaaatgatttttctctcaccttcttattataagccctagctactcttaatttttctttctcaatatgtctcaaggccttcaatctttcctctgggacgtcatctatcctgtccatcattaaattcctataatctacagccgacaaaccattttgtctggctattctaagagcttgtaaattaacctccacaagtaacacggccttctgcccatagactagctcatacggtgttacttgagtcgcaccatgcttagatatccgatgagcccataaagcctctgacaacacctcatgccaccttcttggatgctcctctaccttcttttttataagcttaatcaaaattttgttgctagattcggcctgtccattagcttgagcataaaaaggcgacgaattcagcaatttaattctaaaagattcggcaaactcactaaattgatgtgacatgaaagaagccccttggtcagtagttaaagtttggggtatgccaaatctatgaataatatgctctaatacaaaattaatcacttctttatgagtcatatttttcaaaggaaccgcttccgtccatttagagaaataatcagtagctactaggacgaagcgatgacctttagaagatgaaggatgtatctcaccaacaaaaactaaaccccatcctctaaatggccacggtttaacaatgggatgtagcatagctgcaggtgctaactgaatatttccaaatctttgacatgcctcacagcccttataataacgaaaacaatcctctagcatagtcggccaataaaaacccgctctctttaatagccattgcatcttatgagccgactggtgcgtcctacaaattccttcatgtacctctcccatggctactttagattgatcaggacctaaacactttaaaagtaaaccatctatagttcggcgatacaactcatcatctaacaaagtatattttaaagcttgtcgccgaactttcctatccctcgattgacttgggtctctcaaataattaactaaaggactcctccaatcacctaactcatctcctactgacccggttattccctgttgttggaccgaaccagtattaccttgttcggtcagatcgttaattgtgtccattgttacagtactgattacacctccaaccgaatcaactccaacagtaacaaacgccggcttatttgttacaaaaaacactcccctgttcacatgatagccagacgcctgctgtgctaagaaatttgctctaacattatcctctctagatatgtgacgaatagtaaaagtgtgaagcgatttaattatatccaaacatcggtccaaataactattcagtagtccatcaaaacaattgaattcaccattaacttgctcaactactaaacgtgaatccccaaaagcatcaatatccctcacacccatatctaccaaactttgtaaaccaaacaataaagcctcatactcaacttggttattagtgcaagaatattctaaatggaccgatgtctcataaatcatatcatttggtgaaaacaaaactataccaataccttgcccattcccacaaaccgatccatcaaaataaagtttccatggacacacactaacaaaatcgacatctttaaccatatgatcaacgataaaatcagcaaccacttggcctttcatagcacgcaacggctcatataataaatcaaattctattagtgcataagcccacttcccaattctaccactaaggatcggtcgttgcaacatatatttaatcacatcagtttggcaagatactgtacaggtattggaaagcaaataatgacgaaatttggtacatgcataatataaagacaagcacaatttctcaataaacacgtacctgctttcagtgtcaagcaaacgacggctcaaataagccacaacatactccttcccatcgtcttcttgcgtcaagaccgcaccgatcaccctttgttgtgcaacaacatataatctgaacggcacaccggacttgggcgcccgaagcaccggaggactcaacaaatatcgtttaatgttattaaaagcctcccactgttctgcccccagctaaattcgttttcatgtttcaaccgaagcaaaggaacaaacgattcaatctttccagcaaggttagagatgaatcgtctcaagtaactaattttccctagcaacttctgcacatctctcttgcatgtcggctcttttaactttttaattgactctacctttttaggatctatctctatgccctgctcatgaattataaagcctaaaaacttaccagccgacacgccaaaagcacatttgagaggattcatttttaatctataccggcgcattctttgaaaagccagtcgtaaatcggccaaatgactatcaaacccgtccgatttaacaaccacatcatctatatatacttctacaacaatgcctaacaaatcatgaaaaattaaattcatagcacgttgatatgtagcgccggcattctttaatccaaaagtcataaccatccactcaaataaaccaacaagtcccgggcaacgaaaagcagtcttaaacatgtcttcttcggccataaaaatctgattataaccagcattgccatctaaaaagctaattactttatgtccagaagcatcattaactaacatgtcggctataggcataggatattcatcttttggagtagctttatttaaatttctaaaatcgacacacactctaatcttacccgtatttttcttttcaacaggcactatattagagatccactccgcatatcgacaaggccgaataaacccagctttcaataaccgatcaatttcttgtttgatacggtcatacatatcagaattaaaacgtctagggggttgtttatacggccgaaaaccagatttaataggcaacctatgctcaactaaatccctactcaaaccaggcatctcattataactccaagcaaagcaatcaacaaattctctaagtaatttacataccttgctcttctggtcagcccccatgtttgcattaataaatgtaggtctaggaatactcccatcaccaatatcaacctcctcaagtggatcagctgacgaaaacccctgaccaagcttctacacatcatcgaaatcctcaatagtctcatgcatatcgttctttcctgaacgatattgctcagtgcgcttttgcagccacttaatactgtcttctttattcattatatttacaatgataaatcattaagccgagctacattagccggctgtgcatgtataggtacaaaaccatctctaccaatactaacataatcataatcagacaagtctctacctgtcaaacatcgcatatcgccgtgttgccaatcaaccggcgcttctgtcaaagcaatgcaagctgaattgtccgcttcaattacctccacctcgtcgtcaacccactgaactaaacactgatgtaatgtggagggaatacaacaattcgcatgtatccaatcacgccctaacagaatattgtacctacccttaacatcaacaacaaagaaagcagtaggtattgttttgttcccaacagtgagttccatagaaataacactcttagcctcagataattctccagaaaacccactaagccccatgtttgtcttcattaactcgctttcctttcggcccaatttagaaaagaccgaaagaggcatcacattaacaccggcaccaccatcaactaacatgcgaccaataggcttaccatcaatatgtcctttaataaacaaaggcttcaaatgctcacctgatttctcgggcttctcgaaaatcgcattctttggaccaagaacgagctctgcaacctccatctcaggcgctcgaaattcagcaggcaactcaaacaccatgttaatatccatgcaatcactaggcacattctgtttactttcagaaataacatcaacgtcctcattagcatcagcattgccttcattttcaatgcgtctatccttccatgttttatctgtgagcaccattggcctatcccgattaaaccactcatcacgtgccttctcctccttttgttctctgatttctaatgcccgcaacctctgcagtcgtcgcttttgtgtatgtttaatccctggaggacaccactgtggctgcggtacagtccccggcgccaacctcttgctacggttgccccccgagctgcttgcacttcactgattcgccaaagtttcagctccaaaccgctgctgcacgcctactgtttgctgcacagaactgctgctcccaacaccagcatcctcctgctgtcgcttctctcgccaaaaacctgtcggctgctgatttctgccatagtgtgtgttgctgccgctctttcctagctgctgccaagtgtctctactgctacccaaaccacatggttggcacaccactccctgaactgaagatcccggcgacgcaccatctgcaagctgtccctgactgctgctgccaactccacgtgtcttcagttcttcaatagcagctgctgctaactccggcttctcaataacaacatcaccaatttttagaggaccagcagctcttgactcatccaaagtggccacagctcggctcacaaccacactactaggaccaacctcaccaccttcatgtgcaactgacgccccggcatcatctctaggtcgaattggcacccacatgcgttgtgaaccactcttgatactattgcttgccatgttattttttagtgaattgcttcttgctggcactgtgagcctcttcctcttagacaaattattatcaccaccgttgattacaatagcatcacttgctctagcttctcgtcctctctggttgtataaatgttctccaccaatggccactggtgcattccatccttgctgaaaatgagtcactggcacaacaggatatggagcccaaggatcacaaccccatgaaggaaactgaggatacactggaggcggataaccccaatgcattggccccattccgaaataaggttgttgtacatatgattctccatgccaataaccttgatcaccataactgtgtccaggagaagatctaggacgcttagcacctccaagccgactaaacacgttagtgttcttttgagaagtatatttttctaacaactgtttaaatgtcggcctcggccttggttttagaactggcttcttacccttattaaccttccatactcccacttctggattttttggctttatcatccttgggggcacactatcattaacaacaacattttttccttcagcggattcggtctgatgtgaccgaatgagcatcttcttatttgcaaactctatcacattgacaggaaaaggatcactgtcaagcttcatcttgccaccgtccttgattgtcaaccggccatcattaatcgccgattgtatctgtcgatgaaacacattacaatcattagtagcatgagaaaaagaatgatgccatttacaataagcctttctacccagctcttcggctgacagaatcacatgtccctctctgtcagtctaatttgtttgccttgcaacagtgtatcaaaaattttatcacatttactaacatcaaaagtatacttcatttctcctcttttagtaggtgcaggtttcagggcagtacacacaaaaggttttgttttagatgtatgcacccattcggctacacatatgtcagtatcttcgtcgctagccaaatcctcatcactacaatccacagtattaaccgtatgtttttatttatctctatttttgccatctttaaaccggctatattgtttaacttctttagcatggttttcctgaatcaaagctttttgtaacacctgattaatacctaaaaactcctggccatctaatttctccttaagatgagcgagcaagcctgaaaaagcaaggtctgctaaatcttttttggctatagttaaactaaaacaacgattctttacatttctgatcctcctaatataatctgaaacagactcaccatatttctgcttaaccattgttaaatctgaaagtctaagttcagtctcaccactataaaagtaatcgtggaatttctgttctaattgagcccatgtggtgatagaattaggagcaagagatgtaaaccaagtgaaagcagtaccagataatgataaaggaaataatttaactctaaaaacatctgactgtacctcactgctttgtgctaaaaattgtccaacatgctcaaatgtagaactaccatcctccccagtaaatttaacaaattcaggaactctaaaaccccgagggtatggagttgtatcaaaataatcagggtatggtttttgatatgctcgtgctctgcccttaggttctaaaccaaactccctaagcacactagccaattgatctctgaaatttgcagaaggttgaatcgaattaactggatgtgtaggtgcaacatatgtttgtaacggaactgcatcaacacatgcatcttgtaccggcccacgaggaaccccgatactcgctagcggcaaaggatgattactgtatgtggattgaaaatatggatgctgtaaattagaattaaaaccaacactacaactgttgctattaagattttgtggacttaacactggaataatagaattagtagtgctagttgaaacactaggtacagaactaccagccgaaacagcattggaatttcggccatcttgattgacgtttggaaacaaaggagtttgcaaaataccagccgatgtactggattggattactgtatccggcagactagccgaattaacattatcagaagacaatggctgtttttcgtgatgtccatcattaatttggcgcactatagaacgaatttgacgaggcaaactattctcaaaactttgaaatttatcagacatagattgagcaaattctcgtgacatgtgactcatatctgccccatatttactagctaccgatatgtcaattaaatgagcaatttcttcggcggaagtaggtttactcacctcaggaattacctttttaacgacgccgttccgtgtcttttggtaggcagcgagtagttttttcaactcctcgtcgtgttgccgcagtacctcttgccgttgatcctcagataaatcttcaagcgtgacagtgatgatattctttgggtcaacaacgcttccatcgctcttttcttcaccagccatgtcgcaccgtgaaacaattgatttcggccgacgaacagggccgaaacttctcgacccccagcggagtcgccaaatatgttggcacgcgaaattgatccgcgcaacaacacgatactaaccgtgcttacgtgacgatcaccggagtttttccgagcaaagcaacaaagattcctcgctttcgtggaggagaaccgaccgttttccagcgcaaaatgacaaagatccaccaaaccctagagcttggcagtagagagaaaaagcacgggaaagagaaaacagaaatagatgaaaaactaaataagtagattgattttgttcgattggtccccttccaatcggccatgcacctgatatatatacatacagacgtgctccggtctttagcagatgtattcggcccacgtatatagaaagtaccaagtagcgatcaattctctaagccgaatacaaaacaaaccaaatcaaacaatgccttatctcagctgacatacgtgccaccttgtattcccttccgtataagcttcggcgtcaaaacaaccagcctcatctctgcacgatccattagtcttgatatagcccaaacccatgttgttctgtgcatgatccaataggcccactcaactgcagcatacgtatacggaatcatacggcaaaaagacccgcataacgtatatgcacctccatgcagatatacagcacacgcacagccttgtgaagcagaccatcatgcatgaatcttccaagccatcaatctgctgctgctgctctccagataatagcatcatacctgcacttagaaaacaaaaccaaactcctaaagaatatattcaaatcatctaactactcattaaaaataatttggccatttgaactacctaatcggccaaattacattattaacagttcccctttgcattattgcacatctccggtatggcttggtaagtaccatgagtggtacttattcttgctcacatctaattcagaagatgtatgctctgtagaagatggcttggattgctagcttgtaccgccatcaagtgcctattcaaaactacaagaaagttacatacgagatacatatcagttatatgcaaattataatataattacactataagcgcattgtatttacatgtgagatatttttagaagataatttctcgacaaatgtatagcaaatcgacctagaaattctcatactaaatcgacctagcaaatttatagaaaaaaattagaaaaaataatttaaaatatttgaaattcggattgaaaataaagggaacaagaacccaagtagggatacaatttttaaaatatctataaattcggactaaaaataaagaaaaaagcagaagagttcaagcaataatacaatttaaaatatctagaatttagataaaaaataaaggaaaaaaataagagtccaattagaaagacaaattaaaaatatcttatatttggatatataagttaaaaaacaaaatatcaatgtcatttaatagtgtggctacatttttaatatatgaaaaatagcaactggattgccataaaaatttcataaaacttgtaattgttgtaatatactcccttcatttcgtattataagtcgctttgacatttttaagtcaaatttcttaatactttgatcaagtttataggaaaaatatagcaacacttatatgaccaaagtagtttcattacatctaacattgaacataattgaataatttatttgtttggtgttgaaaatattcctatatatataatacttaaaatgttagtagtggtggtgtccattcccacaccacccctaccactaacatctgggcactacaatctatactattacaccacctttcaacaagtcatcccctatttccgatatcttaatggcacaagagattttggactttaatgggatataataacgttggctatctatttgatccccacaacgccagatcacaaataagatttgtattattataatgtggaattgctatttcatggaagtattctaagcaaacactagtagccacgtcctccaaccattctgaaatatttgcattatatgaggcatcacatgaatgtgtatgtctttgcagaatgataaaccacatattaacatcttgtggtactggttcattagaatcacctaccattatcttgtggtactgcttgtgttgttagatggaaattggttatatcgagagcaaatcactaagaatattgctcctaaattgtcttatcctcacgagctttagcagcatggagacaaacatcttgcaaactaagtcatgtgataatcttgctgatttattcacaaaacctctatgatactacatattatttaaatgtgtcaaacgaattggtacgagacatcttaaaaatttggaggattcagagagagtatttctctctaaaaaatatctttattatattacactcttttctttctatgagttttgccttttaagttttctcattcaaagtttttaatgatgtaatatcaacataagatatatgtcttatcattttacttttccccattcacgttcttaataactgtaattatacacatactactatttttggactatattatgagctttactcataaaagtctaaagcagcttctcatcattttcccaattgggtttttgaggagtttacctaatatacctaacgtaataattatttttaagattttgctaataaatgacatatgatcaaaggctggattcgatcaaggggaagtgttatgaaatgttgggggtgatctcatccatacctttggatgggattaactcccgatgaataggcacggtggttgtgccgtggctcctcgctcttatgctccacgccaaggaactgcagcagttgggccacgttccctcaccctcttgatgcttcttggcaaccggctcgatgcttcccatccatcatgttcttcggttacaaccgattccctgtatatatacatgtatgatcaatatacgaattcactctctcactcaaaccctatcgcttttgctttgattctcaacagccccttcctctcctcagccagcacccgcctctccatctcaatccacagcaggcactccatgtccctttggttcgcgccttgagagcatggttactacccgagctattaaaagatggaacttgagtagttggcgagatatgtaactgatgagcagtgcaaagacgataaatactcggaaaggcaatgtcatccttggctatctaacaatcctggaccatggctagactttcttttccttgagctgggggctcacagaacaaaccattgaaggagtccggtatggattaaatccactgcactcacaggattcaaattttagatgttcaaggtcttttcgtcatccattacgtgcttgcaagcctgcggctctccaaaaggtgagatgaaaagtgaggttagttgttcaccaaaaactgtcatgcccgcttcttctgttgcccaactctaatcctatgcatcatggtctgtagctcttgatgctacattatgtgtaatatgactactctacatttctcatgctgatctatattgtttttattttatctgaagggaaatcacttttatagcccttgtatcaaagctgtaaacaaagaagaaatcattcttcttgagattgaattgcattagcaaacaaaaggagcaatttttatcagttcgggattgtacataatttatttctcgtttcgttctgccaatagctatttggagaactatttcaatattgaaacaattttctttctatatactacatccgtcccagagtacttgtctctttaaggtgaagcgtcacttgacgccccctccaattgtaagggcggccagccaatttcaagaaaaagaagtgaagttgccggagcacttggttcataagttagcatcgcaagtgaagaagctccgcaaggagaacattgagcttagggaccgaaatgcggaactaggggtagagcttgctgagcttaggaataattttgatacccttagtcgcagattgtgcgctaaaatcaagcgtgcattcatagaaatggggaaggagaataaatattatgctaattagatgtctcctttcccataaataaaatggtagtaggtgcttggtttttatttttccaatcatgtaagcacttgctatgaataatgtggctcattggtgttaaccctaatgattgccaaagtttgtttttgtttcatgtttaataaagtttaggttttgaataattgtgggggagatatcccaacttctgatgtgcgcatactctgaaaattgatgaaataactgaacacctggaagcactaaactctgcaaataactgaacacctggaagcactaaactctgcagaaagttgtagagagatcaggcgccagagtggttcaggttcggccgaaccaaaactggccccaatccctctcaatttttacaggtaagcaggtgagcatgtccatcggtatatctccaccatggtatagtaccagagctaaaaattcagaaaacagttggtgcaagcataagtgaaagataaaatttccaaccaatgaaattcttcatatgattgatcttgtatattcattattctcagctgaacttgtgcttgtgaataaccatccatatttagggaaccttatgcagctaagtaattgctccatgtgagatgatttaagatgaaaggaatttttgcaactcttgttatcactcttgggaatttgttttttttaaaaaataaaaattgttttaatagctcattcttccagttgacttcattttatacctaccaaggccatatgcaagagtatctttgataaaccttatcatacatatgactgcttgacattatattgagctttgtcaaatttatgtgactcgtgttagatatctttcatgctctcatgatcaaggggtcaatttcactttcatttccacatacatgataaaaaactaagcttctacactggaagttggcttcccacaaaagttccatttaaacaaacttctactttagactatgctttcttctcctggaaaagttcttggcaaaaagaaaatgagaaaaggagggaaaggcatggctataaaaaaaagagaaaggaaataaagcttgctctcaaaacattgagcaaagttggaaagaaaatatagccataccccttccatatgcatgccaagaaaacaaaatggagagaaggtataggaaaaaggagagaatcatttctttattccaccattccaaaaaatattttactttccattttctaccataaataaagacccttgatctaggagtatgactgatgatctttttgagtccatatttttggctttgcaatatatatgatgcaagtttgtcattatttatccctaccgagctccacatatcaaccttagaataggtgtgaattctggcacattttgccttggtgaggatccaaaaagaaaatatatatccctgagagacaagagagaaagtcaatatgaggaaaagagctggtttgcgaaaattcataaaaatcccatgagtctgacagagaagcaagaaggactggaatcgagattgttccatttatcaatttctcaagatggtaagatagtcactgataaagttcacaggtgcaggtatggttgtgaattatttatatacctgatttatatcttgaagaaattcattctacacttacctttactcagggacgagcaaagagctaagtgtgcggggttttgttggcggctgttaaataccaattctataccgccaacatctacataaagttcagataataaaacatccaacatagtgataggagcttaatctcacaagtgttggtgtatatttgtatacaggtgataaaccctgaagttaggaggaaaatcagactaaagtgaggagaaacaagtatccatagaaggatgggttgtgaacttcatcaaaataccaaagactaagcccaaaattccgagaaacggatagaggagagtcaggggagtccacaggccgaagtccaagccgagagggcccagcccgaacctccctgatcactgttgatcctggggtttggcgtggatgctccagatgctctcctaatgacggttgtagggcagttcaaacatttccccttctcacaaccattataactaccctataaatagacctcacttcttcacttcacacacacttccaagcttgagctgaattataagaggctttattgtactatattgtatactaaaataggaagacagtagagtagaagaagtcagaagaattccggagttgtcgataatcttcttctgtttcttttattctgtttattactccgaattcaatataatattcctcctgagtaatttagatttatcttgtgagaattatctcttggttagttcctaaatagcatacgggattattgttcactataatcaactaaaatatattgatttctttggtgagttataaacactaaagtatatattaattgcttagatgtggtgtttaggtaattgttatccagtaattgctgtgtatcccacagtacgtttgaggtaggtgcagagctggtgaaagccctcaagatcacttaagtcctccctatccgggtacgtagtagagcgacatccgggaacagcgggttgcaagtgcctgaagtattgcattaggattaaagttaagctttccctagacaatgtttctcactagcaaatcctctctatcctggcctatcatctgcttggtatccttagatgaaccggaggaagatctgaccacacacgttcccttggattcgatacccttggaatattccgtagggaaagtgctacattggtatattcctgcgcttgtggattttatctgtgattgtaagaaataccaacaccgctcacacatcatcgtcgctaccctgttgagcttcgcctcaatctcctcgccggcaccccacggtgaccttgctctgtctcctactcgcctcttacgctgcctccattgtgcgtcgccgcgccggatggtcgccgccggcgactgtcgggccacgcaccgccactccctgcctatttgcccagagagttccgctgctccacccttggccgcccgatctcccttcggggcgatccgggccgtccacatggccaccctattgccaccctgttatcagcggaatatggcatcagactcagagaagaaaaaacaaatcgaagcagatttggtgcgaaagcaagtcaaattggaaatagactgtgcatcggctggatgttgcaccgactggaaacagagtcggaatccagttaagccgatacaataaagtaggtgatacagttggacatgggcttggtttgggcctagattgggataacagattattgtcgtatagggatacaacccacataaggcaattgtatctattaattaagatattcatgtcagtttgaattagagatatagtaagagtctgccatgtggacttttttgttctctaggaaagtttgtgtcgtgtctataatgggcgtatcatctacccgtgggtataaatatgtacaccagggtccctgtaaaatctctgaacaatcaatacaacttttcttttaagttttcgacgagttcttgctttgagtcaaggtaccagctgtgatcttctgataagagctaacatgtctcaatggtttgtattatcggggctattatatcgttttagttgtattaatcttgttcttgtaaccattgtttattatatatcttagttaatctagtttagcatctcaatttgatcatatcggctgagattcgttttagggtttatgctagtgttggctaaatcgtcttgccggattaaattagctaaggtaccatcctgaaaattgattaatttcttgattgtttaggctctatgattctttacatactttcagttgcatcaaccctagtcttgtctacaaccctaaactaacctagaattgatcataactaaggatagcatcggagttttagctgatcttacctaatatacatgataatgcatgttttccaatttgctttatgtatatttgccacttatatagatagatcactatatataaatatatcaagtattaaccaacctcggccatatcgttatttgaggattggcatatttatctagattgatttgtctatatatggttgtactggagtaatagccagcatattatctgttatattctaagtattggatcatcagttatttttgcaataccgtctaaaagatactgataaaagacaaacagacagtattacatatctaggattttgcttcacttatttcatcataaagacagagccgatttagattaactgctccggataggtctcaacgatacgtcatcggctcatcagcccatcggctatcgttcatctaactacatttgcttttttccttgttggctgcaggattgaaccagctggcacgctttttatagtcgaggcaagccttggacctacatttgagttaagcaaatctcccagcgagccgtgttttgcagcaacacacctgtgttgttgcctccgtggcgccacgtcggcaccacctcctcccgcctatccaccgtggctgctgcatggctggaacgtggtgtgctcgcagccggtgcacacgtggagccggtccaccgtgcacccgtccccttgaatcactgacaggtggggcctgcttgttagcgccacctatccgctcggctgatgtcataaatcgtatttaattccgtaaatacaattaaagggatgaaatcttctaaaattcataacaaattcaaacgaattccaaattgatccattcaagttgcaaaattcatctaaagttgagctttacatgtctgtttacttttcatgtatggtttatttggtttttattagagtgttttctcgttttgcatgctagcgtgcagaatctattgttggttgtgtcttgtaggtacagttgtacacctctggctagagtaaaactattctaatagccatgcccgcggttatgggcgatcgaatagcttcactgtgattagccccactctattaattaacttggcataatgaatcagagtagttcaggtgggttggttgggcctgttcaacgtggcgtagcgttgttcagttgacatctaatcttgaattaatcaatcaactgttttactcttttcaactataaatgtttacaactacttttatgcaaatagccacaaacctcccttgtctccccttgcatgattacatcgttggtgtggcttgctgagtacggtggttgtactcaacattactattattccccatgttcagaagtgttgtgtttatgagttgaagacaaagttagtggaccaaggcttataccccaattgagtttttgccagtggagtggagctaatgcgtcggtaggatcgccttttcctctgctgctgcattcttttcggtgtgatgactaagtgcctcttttgttagtatttacgtttggatctatacattaatttgccattttgtgtacccttacgtgattcctagacaggggtttatacactagatagtttagaaatttggctaaatttctggccatgacatgaatccagtgaatgttgaccgtgggtaatgaaaactacagatttattatgagttttgcaacttaagatgttgacaatgctcatatgtgtttatatgagatttaagcacactgggtttttattaccaaatgtgatagtgcttattaaatagaccaaaccatagcctacaaatcatagatgtttgtatgcggaatctgacaaattagctcatcattacaggctctacgaacaacgagtagatattatccttgattgtgtggccatttgtatatgcatcatctttcttataaaagaactccatcgttcttgttaggttgaatattcgttccattagttgtattggttgagtattaccagaatccaaccactcgccattgaaatctttccatgactcctcgattagtagatgtatcttctcatacgccatttcaatgtcaatgttgtgttccttcatgcagctatctattgtcgacgctacatgtaaagtcaatctctcacgctgcataagaaatttcctcatcaaaatttaaacaataggaaaagaatgtaacttaattagtaattatctaaacaatgttgctgattatttttgaagaaaatactccatgtgtctattatagttatacaaatgtaatatgtgtctaacttaagaaaataaactttacctcatatgacttaagatcatcggataacctcaaaattatgcagagtgattgtactattttgggcacactacatacccaatcaaagcagtcttttgaaactatatcatccatccctacaaatgatgtgcaagacagcaggtgacatgcaccactcctcgctgaaacctgcaagtgttcatcaattgttccaggaatgtaaccttcttcacgccatttcacctctttgttgtaagctctaaccagatctactgtctgcataaaattaagacaaaatgcttagcagcatccacacaaaaaggagctaaaaattcatatttgaagtatattctccctttgttatttcaaagaaaggtgatttggatcaatcataaattgcaatcataaagatctccatagaacaatcgacattgcaaatatcaaaaatctacacaaaataaattgcaagtactcatatcaaggcatgaaatggcccttttgtccacttcttctatttccttttagttttttaccttttgttttactatgattgcaccatattgacaatcgttaagtaccgatttcgaccgttacttatgtcagtaaataaaagggaactaacatttcttacatacatattagttaccttcgtcccaaaatgtagcaacttaggatgggattagacctatgctaggattataaatctagacaagctccatgtctagattcgtaatcctaggatgagtcctatcctagatgatctaatctcattctaggttgctataattgggacggaggtagtacaactaatgtagttccacttgtccttgtaggatactatggatgcagtgattatacaataaaccgaaggagaagatgtgcctacatgcaaagaaacacacctccggtgaatcacgtgagagcacacgaattgaatagacaacaaatcagaccaatccaccatgcaccaccttatgggtccacatgtcaacctctgggagaaaggcggtggacataggtggggcccaggggggctaaacaggtggtgccccttcccccccccccccttatctttatcatgcacatggacattctgattaactcctgatggcggttatgggcgttaatcaacccactcaactatcataagcaactataaaaggagaagaagctctcacttcccaacacacactcaataagcaatttctctattctacatttgtattactctctagattagtggagtttaggcttagaatagttattcagtttcctagttttctcgaagatttgagtatgtctttattactttactctctttgtaaaaatatgagtttactaattaaattatcttatttttttagttgtgttcgtagttcatatattgtgtcaattatatgacctatgagtagtttatacctctttcatatactatatatgtttaggctagtcaatctatgccatggccttggtccaatgatcttaacgggttacattagttctaacttgtccatctgaagggtgggaatcctgggagaattagttgtattatttagcatgtaatcatggtgcttagatttattaaatgccattggtgtgccccatggaatgcaaaggtaggaggctggtggtaacaaccatgtctatactttgtaatcttccgtatttgggtatgacgtaagagttcgtaaaatgacataacacactggtataccaacagggagttgtctctcggtagtgactaggtgcctagaactaaatgcttatgtatatgaatgtatgtatcaactaagaatgataacatagaagtacagatgaaaccaatagcttttcattgtctttctcactagctagtttatttattgagatgattcttctgtatgtcacactaccaaattagttgttgttgctgtggcggcggctgctgctgctactactattactactacaactattattattattattgttgttgttgttgttgttgttgttgttgttgttgttgttgttgttgttgttgttgttgttgttgttgttgttgttgttgttgttgttgttgttgttgttgttgttgttgttgttgttattattattattattattattattattacatttacccatgttagactatcatatattgattatcgaatgattatgatatatcgacttattctttacaccgtcgctttccctacggaaaaacaaataacaatacccatagaatactgtcaggtgaaatgttacaacggtatccatgcgcttgtggatttatctgtgatcgtatcaaataccaacacactaagttgaaatttggagtttaaatatttttaacattttcttggcatttccaataaaacaaaattgtatctacagaagtattttctttactttaagaaaggtagttaagaaaggaagaacaaattttagaaactaaatttaagatagaaaattcttgaactccaaacatattcaagaaaaaaattattattatttcatgccattgactttttttcttgaaattttggacttcttgtttggactagtcaatggcatgatgatggtaatgatcagtgtgggggaagcgagaaggcaatgatgcgaggaggatacaattgcacaaggagaagatggctggattgctgagataaactactctctacatcaatattcgatttattgcattaagctactctggctcttcttccactgctccttgcatcgagtctatgatcctagggcttcctaatttgcacggtagaaattttttatttatgcaatcgtagcgtactgtatgcctataacacttcaatttctatctaatttacacctctaaccaattatgtaacaagtattaattgttagtgatggttaaaaaacaaaaaatgttattacttgccatgttaccctgtttgatgcaagtgattactagcattgaactacccattcagaggtaacttaaattgatatattaagaggattgaaacctttatgagagttttaaaacttcaataactcaaatacatgaaataaatttgcaatgataaaataacttagaaaattttttaggtatgacatgcgatatttttcctccagtagtagctcattgtggagattatgggtaccccatacccacacggcgtggttatctgactggttataggggataacttatatctatgaaatatgtaacggatcatgacttgggtattacgtttccctgtatattatggaacggcctaaagtcctggtttgataagattgtaaagtagatttaggaaaccgataccgtgttggttaaggtttctatcttgtaatccagccccccatcatatataaggtgggcagtaggctctctagggggcatgagacaactagatcgtcagatctatactacactcggcggattcaaatccccaaacaggagtagagtattacctctcattgagagggcctgaacctgtctaaatccttgtctccgcatccatccacttttaggtctcgtgcgctacccccttttattattgccgaattcatgtttcgacagttggcgcgccaggtaggggtgcttcgagttcctcgtcgaaaagtgtgatggaactaatcttggaaatcaccggcgtggtcttcggtccacgatccatctattattatttatcaatttctaatacacagattgatgtgtggcccaaatttttgtttgcatgcatgtcctggctgttgatgagatccgccagctaccttcaatgacgacgtcgtgctgaaggaccatcaagttagccatcggttacagggccggatgcacatatgtggtggtggttaattttttaatcacccctggcaagctggctgacgccgacttcttctacaaatcgatctacatgcaaacatacatgcatcgattaacattcatgatcatctatacttttttatttgcttatggtactaatctctatttgatctgtggtttattattttgcatgcacccccggtcgaacgtgtccgatccccatcacaagaagtttctgactgggatttgatctggactcggacctgcgatctgtacgagcgcatggcaggacctgtcgggtgatgtgtggatgtgtctagcgttcatgccacaggagattagttggctaattaatcaatatatgcaagccgtgtatatgcattgatatatgcaaacatacatgcacaagcttctttatacctatatttttcttatgtggtactaagcagatgatctattcattgatttattttgcatgtacccatgtcggctacctttgctgttgctgactaacatcttcactgaccggctgcctcgtccgctaccgactggagccctcgcctgcacggctggtcttttatgccgccgctattgggtgtctacgacttcactgtcgcgtcccaaaatgactctaaaatacatcctcgaaattatgcctagaataattaaaatccttgtgaaagcctcccacaagtaaaatgtgcaaagttaaaagtcaaataaggcttggaggatttttgtatatttcctaaaagcctaaaatgcgtaaataaattttagtggaattttcagagcacaaataataattattaagaaataaacaaagttaaaatgattttataaaaagaaaaatcctaaaaagtcttttcccccctccccctcttgggccggctcggcccatctccttccctctctctcctcctccccgcggcccattcggcctcctccccgcgcgcgcgccgctgacgggcgggcccgcccgccaccctcgctgacgggtggggcccacccgtcatccccttcctcccgccgctcccgccgcctcgcccgtgccctagcgccgccgccgccgcaaatcccgccgctcccgtccgccccgcgtgcaatcaagaggggggaaatattccccgtgattccctccctctttcccccccatttttccctccctctctccctcggattcgttcggaatctttccccctaaacctcgccggcgcatcaatggcggccggatcttccgcgcccgtttccccctcatccggccgccctctctcactcccaaccctatataaacactccccgtgcctccctccaccgtttccgccactcgccgctctctctccgccggaatcgagctcgcgccgtcgctctctctctccgccgtcaccgccgagctccggtctgccgccgtcgtcgccccggaccttctcccgcttcggcgccgcctccttcggtttcgccgcaacctcgccgacctcgtccacccctccgtttcgcccgccgaccgccggaacgccgccgtccccgtctacccgagccgcgccgccgccttcctatgctccggtcgccgtttccgtcgtcgccgtcgacccggggtgagctatggaccgccgattcgtttcccccttccctcccctctctcgggcgccgctccgccgcgccggtggtcgccggcagcgaccatcggggcgcgggtgcgccgcctcccgtcggctgtgccggcgtggccgccttcgggcgcgccccgcggctgccatgtggggcccggccgtcagccgcccgcgccctcgggtgcggctgacgcgtgggacccacggcgccggccggtgtgagccgggagcacccggtccaccgtggaccgtgaggctgccgcgtgggccccactcccgtggacccggtccgcgcgccccttccctcggctgacgcaataaatccaaattttaaattaaaatttaagtgaagaaattcgcaaatattcatttaaagagcatataaccttcaaatggccataacttggccatttgaactcggaattggaccgttcaagtctctaatttttccttaagaagtcaagaacccatttttgtgctttgtttctgcttgttatatggagtttattagagtaaaagccttttcttttccattgatcgtgtagacgctgcagcttcggaagatccgctcttcgtggaggttgaagccgacgtttgggaaagcgagcaaggcaagtcacatcatctttgaacatattgaatcccagtttatgaaattatgttgatttaaattattgcattatcgcgttatttaaattcccgcgttatcactgttttgtttagccatgcctatttacctttgttatgaccttattattgttattgttattatttccttgttcaccctagattaaacaaaaccccaactagtggacactctactcatggtaccactagtatgatgttaggtagatgcttcgctatttaattaggtaacattaggcggttttacaactctagactttgggatattcatatcacctggacactttggaattgttggagtattgtggaattggattcacaccgccccctctattcaaaatccccaaaatggttttaggctgggctcggggtgcatggttttgatagtagcacctcggccatataaggaccggtcttcgggcctctgttgcaaagcactaccgtacttccacatgtctagtgggtaaggcttagtttgtggctcagtctggttataaacaaaagtacacggatggagatggacgaagtcgggggtcgatggacatctccagggcaaatgaaggctacacgagctgcggcccggtagtcgagatgtcgtggaacaggcccgtgtcctgctgctaggggctcagtcctgcctgcctgtcccgggggttccggccgtaggtgggattgggtcggtactcttgtctatggctaggatgggttggaaactatgtcatgtcttccgtccgtataccatggtggtatgtggcacgtggttacacgtgaggaagatgtgtcttgtgggtaaagatgtacacctctgatcagagtataatctattcgaatagccgcgccctcggttatgggcaagccgagcaatgtacccaagttagtgttttaattcttaaaacctgcttaacaactaaaatgtggaatggttggcctgggttggcttgggacgagctgggacccagggtcgggttgccggttcggtctgaatcatcgtaggccttgggttaaggcaggttcgtgtgggttcacggccttgataaataatattgcatagttctagaatcgtgtttacaaaatagctttgagcaactaagcatctttaaatgctgtttactgcaaccctaaccctttatattataactcccttgtactcccttgcatttattatgcacttgtgggtgtgtcttgttgagtacggtggttgtactcagtcttgctcaatttttcccaacccagaagaggagcccctggttgatgaaggctttggtgtctagctcgtgcctgccgtcaagcgcctgtggtcgtcgccctagtcttccgctgtttctcgtttgtctttgtgtgtgctgggccttcgtcgcccatgtaataaattatctatttacgcttccgcttgttaaactctgaattatatcaactcttggtgtaccttgcctcctgggacaaggaataatacacgcacgaaaggaacgcccgttgggttaattccggtcgtgacattcaccgccggcctgcctccgtcgccgccgactgttgtcctcgcctttatggttggttggtcacaccaccgttcacaggcgtccacgtcttcaccgaccggttggccttcgccgccgccgactggtatttctgcctgcacggctggcctattatgccgccgctgtcgggcgtctacgacttcaccgccggcctgcctccgtcgccgccgactgttgtcctcgcctttacggttggttggtcacaccaccgttcacgggcgtccatgtcttcaccgaccggctggccttcgtcgccgccgactggtattgctgcctgcacggctggcctattatgtcgccgctgttgggtgtctacgacttcatcgccggcctgcctctgtcgccgccgaccggtgtcctcgcctatacggttggtcggccacaccaccgttcatgggcgtccacgtcttcaccgaccggcttgccttcgccgccgctgactggtgtctctgcctacacggctggccaattatgccgccgttggtgggcatcttcggtttcaccgtcgaccgccttcgtcgccgccgactggtgtcttcattattattgatgaacgactttgttcccacattggccacctctgccatcaccaaggggaatattacacagctaagtcatcaataattttctttatatgatattttccttttcctctgcctcactacattaactggttctccgttgactagtgagtcgagggctatagatgttatatcatatttttaaacaatttttatttatcttgattgcttgtgaaataatccgagtaacaataaagttcctatcgagttatggagttctatcttcctatgctttccgtttggtttgccaatggatagttgcctttgggccgattgctagcacccgggggctcgttggatggaccgagtaacgcaaggtgctaagtattattcagaataaattaaaagcatagagataagataaatttattttctgctcttcacaattgcaaaagtactcgagtagtaaattctgattcgtgaaacttagttccattaatgacgaactcatgtcactcatatgcatgtttgggaagtgcctaggccgactcctgatgcttggggactatgactagtcgggcagagtgtttaaacgtaaggagtcatctgctcggggaaatcaaaattgacaagaggagaaatacatatttataaatattttaaaatacttgcatttttctccagtattatatttacatcagatactactcatcctatatgtttgttctgcaggatctaaatccagatatgcataaaatatgtttgttctgcaggatccaaatccagatatgcataaaagggattcatggttttcagcttatctcttacgctccaggaatggatcagtcagaacatcaccaccagctcgccatcgtcgccgccgactgctgtcttcgcctatacagttggttggtcacaacaccgttgttaggcgtctatatcttcaccgccggtttgctttcgccgccaccaactggtgtcaccgcctgcacagctggcctattatgccgctgttgttgggcgtctacatcttcaccgaccggccgcctcgtccgccgctgactggtgtttccgcctgcacggctggcctattatgccgccgttgttgggtgtctacatcttcaccgaccggccgcctcatccgccgtcgattggtgtcaccgcctgcatggttggcctattatgccgccgttgttgggcgtttacatcttcaccgaccggccgcctcatccgccgccgactagtgtttcggcctgcacggctggcctattatgccgccgttgttgggcgtctacgtcttcaccgaccggccgcctcatccgccatcgactggtgtcaccgcctgcacggctggcctattatgccgccgttgttgggcgtctacgtattcaccgaccggccgcctcgtccgccgccgactggtgtttctgcctgcacgcctggcctattatgccaccgttgttgggcgtctacgtctttaccgaccggctgccttcgtctgccgccgactggtgtctccgccttcacggttggttggtcacaccaccgttgttgggcgtctacgtcttcaccgaccggcttgccttcgccaccaccgactggtgttttcgcctgcacggccggcctattatgccgccgttgtcgggcgtcatcgacttcaccgactggccgcctcgtctgccgccgactggagtttctgcttgcacggccggcctattatgccgctgttgttgggcgtcatcgacttcaccgactgtccgcctcgtccgccgccgattggcgtctccgcctgcacggctggcctattatgccgccgttgttgcgtgtcacgcccagaaattcactagtaatttccgaacttatttgtgcataaaatcctcgtccaggaatcagccgatgtgcacaaactgacaatttaatatacagattcatcaaattaactaaaacgataaatacttacttaagaggcacttagtcctcaccatgaagaaaactacagcggaaaataaaatctagcgaagctccggctccactcccacaggcagctcaactggggtataagccaaacgtcttctccttcgcaacttgtcttcaactgaggtttgattgattattgcaaggtgagcatatgacatactcagcaagccatacagcaaatatgcaagtgcacaaggataccaaaggatggcataatatagggctcatttgcaaaagcagcatttagcaaacatttgagaatttgtaaaacaatagagtaattaatcatcaatattaatcaacactgaacagcacacccatgctgcacaggcccaaccattctaaacaaccatacccggctgcacagatctatctccaaaccaggaatataccattctaaaccaggagctaatcaaattattaccagttatagcatcatttattatggtgaaaagtgtgagactaatcacgaaatacattgttagacccgcccataaccgcgggcacggctattcgaatagttttactctgggcagaggtgtaccactgtacccacaagacacaacccaccagcatgttgccgtgtccgcgcagacacgtcaccatgttgagtgattgtgacaagacccctcgcataactcaactcaaagcagtgcaccgttcccggatcatagtcacccccttataaacaaggcatggactccccagcgacccccgtgggcttatctccgccacttctcagtctggtgctccgcaacgagccttgttatacgaagtgtccagccgttgcccattctggcttgtggttggcacggttaatgtttcacaaccgaaaatcgtgaaccggtccttaattgtcatgagcacgaccatcaaaaccatgtgctcacaacccaccattatcaagttttagttggtacattaattaattaaccaatcacgattgactatcatgagctatcattaaatatccatcattaagtaatagtgaaacattagttatcccaattgtgtgctaatgtttctaagcatggctaagcaattatgtctaacatctagctgaaccaatatataaagcccaactagccaaattataacccaaggtatcaaggaatagagtaatcaatgcaaacaggccataacaaaggaataagttcacaccacccagtgacattagaaaataaatgcacagttgaaataaatagagaatttaaatataggatcaacatgctcaaaggaattgtgttcaggatctgtgtgacttgccttgtaataacgggtcttcaattaatcttcttgaacacttccagcgcactcgcaaaccttcgaaacgacgggaacgacaagctaacacacaaaacgaggaaaaagactaataaaaaccaaataaacaatacataaaaagtaaacaaacatgtagatcataattttagatgaattatgagacttgaacggcctcattctgacttcaaatgaatttattacgaattttacaagattaaatctaattaaagcccatttaaaaaggattaaataaatttaattcaatttatggataattttaatatgtagatctttattttatacaacttttgcaacttgaaccacattaaactgagttacaatgaattagttatgaatttttaaagattaaaccggattaaagcatttatatggattttaattgaattacgacacaataatgaattatttttgaaaaggaaaagggaattatagcgtcatcggctagggttcgtggaggaccgggtgcacagcggcggtctacggaatggacggccgagatcgatccatccaaaacgaacgaccgagatctatcggcccacgaccggtccacgggacaaggcgacgatgacgtcggcgataacgtcatcaccggcggcgactcggctcacgcatgctcgacggcgaacgacggtgaggcggcacaaacggaagacaccaacacgtagaggatgacgcggcgaactcaccgagcacttggatggtggcaaacgacgacagacgacgacggcggcgaggttgaagcggcggtggtcttcgggtcgacggtgacggtggtgctccggcggtcttcggcggcggcgaagcagtggacgggaacggtgacgacctcacgatgccgatggtggcgacggcgaccgaaggcggcgactgcaacggcggcgcgtcgcggctgaaccgacaacaacgacggcggcggctagggctacacggaggcggcgctacacgcgacggcgggctaagacaaaagtggcggtggagagaggaggtcccggggatctttttataggggctaggaggcggcgacgaaggcccacggcggccggcgacgggatggaaagttagggttcggagagagagagagaccgatccgaatcgacctcgaatccaacactttccaagcgattttagccggtgattccaaaagagaaaagatagaggagatcgagaagatcatttcccctctattgatttcatcggaaacggaaaggatcgaccggattggaatggcggcggcggctagggtttcgtcgggaggaagacgacgggcctgacccacctgtcagcgggcgaacgcgcgcgcgcgggcggctaactgggccgattgggccgagggagagagagagctgttttgggccaactttcggcccaaagccaaaaggaggatttaaaaacatttttctatttaaattattcctgaaatgcaattccatttattaaaaatacttccttggctcaaataagtcccagaaaaatctaggaactaaagaatcaagagaagtatttaacaaaattttatctagcccaattttatattgagatttaacaaaattaaattagatcttctcttttaggcttttaggatcatttctaataattccttttaaacaacaatttaaaatttaaggatttttaaacaagaaaagctcttaacataattataattagatcattaattgattattgattaactaattactgaactgttctttgtatcatttaggaattgagctctgaaaaatcagagaaaatttcagagagtataattaatcatggagaatttaataaaaattaaatccagccatgctttaaatttagaaaattttatttcccacatttaactttacttgaaaattaatgaacatttaatataaattctattaataatttattaaataatttataaatcctaaaacaaaaaatctggctgtgacattgcgcgtctacgtcttcaccgaccggctgcctcgtgtgacgccaactattgctatcatcttcacggctgtccatgtcgctgccatcgctaacaggcgtcatcatcttcaacgcaagctgtctacgtctaccgctgactggtttcttcacttccatggctgcatgattctaccagtgttgattggccttatcgtcttcatcgccggtcgtctcgtctgctgctgactagtgccctcacctctacgtctggtttatacagctaccactactgatggacatcatcgtcttccgtcgccgactggttatgccgctgccgactggtgcttttatcttcacaactgcgcgtcttcactaccagtttgcttctgttgccgccgactcgtattcacttcatcacggcaatgcaactttgtcatcatggtagagcgacctcatctttattatcttcggcaccagcaaactctattgttgctacttcgtaagttttgctacttcaccaaccacgacgtctttgtgaacctcgacatctcggcatgcgatgccgtgttattttactacaagtggctctccaatattcaggatttctacttggacatcttcaacacatatcttcaatcaagcaatgactattcaacgacaagaagctacagttctcgactctatgttcagttgtttcccaactaatcaaagagtcgggggctacacaaatacaaggctcaaaatttgacaaattttatgtcaagctgaagaaatcaattaatcagccaacaagtcaactccaggagtcaatatcttcatctttgcttcggagcagacattctacttcaacaacttcaaatatttcggtttagacgagttgggcaacaacatcaactctcctccaagtgaagcatctacaacagctataacattaatttgatggattattgtcactgacatcatcaccagcacctctgcttcatcggctctgacatctccgctgttgctaatggatgattatgtcttcaccgacttattatttcaccttcacggttgacctactatgcaaatgctgatgagcgtgttcgtcattatcattggttgcgacactgctattaacaggatcgccgacatcatcatcttcattatgtcagttgcgtttgtcgttgcggactattttcttcatcttcatgattggtggatttcgtcgtagcctttgatttgcctcgtctgtcaccgactgattatttcgctgccatggctacacaactttatcgctgggcgccttcatattcattgctggctgacctgactgttgctgactggtttctttgcctccatggctgtgcaacttcatcacttttgattggtatcactatcttcactaccaccaatatttttgccacctctggtgggcaatattatctctatattggtcgtcttgtctctatgccaactgcgtcagctaccatcaatggacaattatgactacgacagaaggacaagctatatgctcaaaggcttactagctcaaacacaagtatcataccttcaatttggacttattccggatacatgcaacatgaattcatgatcatgggtttattttctatgctcaaagactggactatttattattccccgtaagggttatcaaccgaatacttgcgccagtcgggattcaattattttatctatttgggagtatcccataagggatagtcactcagatcagaagctattcatatgagctatacttggtctatatcacccggaagatttatcactcgggagcatgttacatgcgtcatcctttaaagggtgtcgaaggcatattttttggcctaggcctaatatgtctgcagcccatattttcaggtgtggcctgtcacgttcttttagggacttaggcactttttgcttaggccaaagtgcgcgtgatcaagtgcccaataccttaaaatccttttataccacagttactcaactttttaggagttggtacaatgcatcttaaaaggtgtcaaacagtaaagctttttatagctgccccggtgacttttttatatagtcatggcgctgtttgggtttatcaagcaattgattggatacaatattattgttttttgccacgtaagtgtgcatttttattgactaatattatggcttaggctgattatatattttggttattttctagacggttggtaaatccttatgagtttatttactcagatgttacaccacctatgtcatatatttccaggtgtggtgaaaccatgtgtcttttagggacttaagcacatctgttaaagtagtgtacgtgtggtgtatgcccaatactttggaaatttctttattcacaacatcaagctcttctttatagctgttttgctatgtgaattttcaatgatgtagtcaattttagattgcatgcatcatattttacaaagcagtcggtacatcactcggatcatgttattcgggattcacaccgcatatgctatatattaatattaagtcacttggttgactacaattatcaaaaccactcggttggttggattatttattccttgactatatgcttagtttgttcagctaaccacatagtcgggggctacacctattaggtgcatctagtcgatgcacctgactttatttttcagcccagcacagtcttcatatttggtaaaagtactcgggagatcatggcgatgatgattgaagcactcggctttggagtaatctggtttgagagaagattatcttttcgactgcgaaggtctcaggggctactgtggagattatgggtaccccatacccacatggcgtggttatccgactggttataggggataacttatatctataaaatatgtaacggatcatgacttgggtattacgtttccctgtatattatggaacggccttatgtcctggtttgataagattgtaaagtagatttaggaaaccgataccgtgttggttaaggtttctatcttgtaatccagtcccccatcatatataaggtgggcagtaggctctctagggggcatgagacaactagatcgtcagatctatactatactcggcggattcaaatccccaaacaggagtaggttattacctcttattgagaggagctgaacctgtctaaatccttgtctccgtatccatccacttttaggtctcgtacgctacctcttttattattgccgaattcatgtttcgacactcatcatcaatgttttggtaggtatccaaaattttttcaaacgcaaatctcagaagctcggggagattacaacccatctttgggtcccagctgaacatgattaatcaccgtcaaaaacattggacacgaccgcccacaagataatacatcatttacacctataaaacttatatgtgctatacaagagttcaaagaaatactacttgatgactgatgagaaatataattatgataatactccatccgtcaggaaaataggtcccgttctagtttattcagcgtagattaaggtttaaggaaaataaaactataatattccttattaaatagtgtacggttgagagtgggatgttgagggtaaaatagggaaaattttaaaattgagatgcctgggtaactatttgagataaaatttaaatccttgaaaaaaaaactattttgggatggagggagactcatgaatcggataaatgagttgcagttatcgaaatttcaattgaattaatatataatgtattgaattgaattagagttttaggttttgtttatttttgttattcacagtaaataaataatttaatccaaatatgagagaatacagacctttctatacatttggtaaactgttcacactcttctggagatccatatacatcataaatatcgtccaaaatagacacaatggctagcacttttgtcaatataattcgacctcgagagtaacatggctcgaaatatactcctgctatccaaaagtagcactccacaactctatctcttgcgaaggagagccttgtttcaagttgcagatccttccaccacctgtagacacatgtaaaatacatttttaacgtttattaatatggaacataattttaacaaaaacaggttacttaaccttgtaattattttcagctcttgctgatgatggatttgcatgatattgtagctcaactttgcaagttccataatcatctcattcactgaagctcctttctcatatgtagacataaaatacttggcctcatatattcgaacccttctagggagagggatctcaagcgcagaatttatgtcatgagctagtgacccttcaacaactttgggcatcaatgatcttagttgccttttagtgaaggaaatagcttcatcaagtattccctctccatgtgtcgtgagatgagcggcattgtaaagacttagcaggtcccttgcgtcttctgcctcaaaaattccatcttcatctctaaacttcagaaacacatctagaatacagaatcgaagtttgtgaatgccgccagcatttcgtggaaatgttaaaaaatgtgaagggaaaaaggcccaaatatgattattttttcagccagttagcacccgttttactactccataaagaatatcattggtgaaaaaaacttatctcctggtcatgatttcgttattaattacctggagaaactctgtgtcgatgtttaaggagaagataaaaccacagagctacagtatgcagttcacagtcactgacatcggcgtcgctaatttcatccatcacagcgttaatctcctcttcgaacagatggtccacacagagacgctccagtacatctataagatgcagcttctccggaaggctatcggttcttgaatttactatgagttttgccacctctttcttcagatactctgcccgttcttccatcgatctctgcgggaaaaaggaacattcttaattaaactaactctccgcctgaaatcaatttacatgcggccgtaagaaaatcacagctaattattcataaactgtaaacattctggaacaaatattctgtggtaggtggctgtgagaaaatcatttattaagtacatgcgctgtacttttggaatgaataaacattctgaagaaaatattctctgttattaaacaatagcttcttccatttccgtgcttatatatttatttgtttatgtagttttcctaagggaaagtttctgtgagactgcaaatttagagatttccggctagttaattcagactcgtaaaacacagaaacatatagagacagagacggagagattgcagaatgtgaagcgagaataaacctgattgtcagagtaagccaacgggttgcagtaagagaggaagaaatctccccagatggaaggctcgaactttgcttgattcattctgcagagatcattcttgtcatcaaccttggccatcgtcctgcagggagaacggcttggcgtcttcttagacaccactgctccttcgccgagtcttggttcagcagcatatgcagcagaggctacagaacaatgggagcttcctctgggctgatgtgaactgaaggagaggaaggtagcgggcaacttcatgctactcgtcatctctcttggcttgtatgcttttacaatggcaccttctgctaggtccttggtgccttacgtactgccatggccacggtatgtatatatagtactctaaggctgtgtttagttcacaccaaaattgaaagtttggttgaaattgaaacgatgtgataaaaaagttggaagtttatgtgtgtaggaaagttttgatgtgatgaaaaagttgaaaagtttaaagaattattttgaaactaaacacggtctaaaatgattacgggccatccgtcactttaatttggatccataagatctgattctatgattgactatagtacacgtgacagcgtgggtagtaaaatattttagaggtgtaaaattggaatttaattaataaaaaactctacctaaaagacgaaaaacctgcacaatatttcttaataagaagcactcaaatcgggatcgagaaatatactgttagaataggtgtcgaatatactagtcctattttgttataattggacttggagttgtaataggtgttagggggtagagttagagtcagactttgtaacccggcaactctattaaatagagaggggggcaccacaatgtaaccatggcgactacaatggagcgtagacatgcagggagatgatggcggtgtgccatggactcgtagcagctaggtgctatattggttggggaggagcacccataatcagagccccggggatataggcttcggctgaacctcgttaacaaatatcgtgttttcttgtgtcgtcatctagcgtgtctttggtgatcaatgattgaagcgatcgggaaggttagttgtcgttccgctatatcgactaacatttataacaagtggtatcatagcagaaggtttcgtcattggaacaagaagacatgtggaggaggaaacacgaggtgggatcgcgcatcgacaggagattgtcagccgtggcaatgagatcgatggcgacaatgaggacgttgcggaggcgacgacctcactcgcgatcagactggcgatggcggaacgtgaccggaagacggggccgagcgtggccgaaggcgaccggagagatcggaggggtagcgccatggacggcgcacccgacgcacgccgcaaacgcggatccgcggcggcagggaggccagtgacggaagggcgaaaccggcgagcgtggcatggcacggcggacgtggagggccgagacgacagaattatggacagtgaacacgagggctgcgactgcggtgcgtgcataggcacggacagatagcataggtgctgtcttatacgtacggcgtgcaaagactaacgagtaaaggcaagaagcaaaaccaaaacgagcaattgcatgcaaacaaggacagggaacctgaagctttggaactcgtgcatggcttgagcatattcacatgaacatgcagcatgcagggcatgcatatcatgcgtgcacaagggatcaaaggggtagcagtaccaatgcttcatacatatggaaacttttgtgccatgggagtctgacatattgatgagccaaaaagaaatcgagtggaggagttggatgataaaacgacttgtcggagtcggacaaggccgactcgaccgcagttgctatggagttggattcagagttatgtatggatacggactcgtgatcacatcaggctcgtattgcttgtcctttaaataggcagccgaagagagagccgaaccaaagcaacaaagctcgtgacattggtcaaacgtggtacaaggggctcaattggcttgctgtgcagaggctcgtgacaaagtgcgcgcgtacgggtgcaccaagccaggccgatgagatcgtgaggagcagaggcacatcgagggtggaagattggtcacatcggattatagcgaacgcggtttgctgttgaatgtctgagatcagatcacaagacaggattgtaaagacgaatacagacggttctgagcagggcgagtattctggtggcgacagaccagtcaggtcgcaggttggcaagatggcgctgacaggtatgaaatttgatttggtgaagtttgacggctccggaaattttggcttgtggcagaccatggtcaaagatttgttagctcaacaaggagtttcaaaggctttgaaggtgtcaaacaggccaagatggaggatgacgattgggaggagatgcagttgcaggcggctgcgacaataaggctatgtctctcagatcaggtcatgtatcatgtgatggagaagacctcaccaaagataatttgggaaaagttggaagctcagtttatgtccaagactctgaccaataagctatatctgaagcagaagttgtatgggctaaagatgcaggaaggggcggatttgacagcacatgtgaacgttttcaatcaactagtcacaaatcttgtgaagatggatgtggaagttgacgatgaagacaaggccatagttcttttgtgttcgttacctgaatcgtatcagcatggggtgactactttgacgtacgacaaggagaccatcaaaactaaagatatcacttctgcattgttggctcgtgatcagatgagaaagaacagagagggtgaaacatctcaagcggagggtttgctagtcaaagaagatcatgctgggcataagataaagaagaacaaaaagaagaagatggtgcagtgcttcagatgtgatgagtgggggcatataagcagggagtgtccaacactgaagggaaaagcaaaggctaatacagtgaattcttcaaatgactcggatagcgatggttgtgatcttctcacaatgtcaagtgcacagtataaggatgcagaagcgtgcatattagattcagctagctcgtttcatgtgacgccaaggaaggagtggttctcttcatacaagtccgatgagtttggttttgtctacttaggcgatgacacaagttatccggccgtgggagtaggtgaagtcaaaatcaagctagaagatggaggtgaacatgttcttcagggagtcaggcatgtaccagggctaaagaggaatctgatttcgcttggaaccttgcatgaagaagggttaatattccgcggtaatcggaataagaacaccatggagatcatgaagggcaagacgactatgatgactggagagaaggtggagtcgcaactttacaagctgcgagggtgcactattgcaggtggagtccaagaggaagcggttgctgggatagcaattgtttttgaagacggcaggtctggtgcagactcgtcgagtggcttgtggtgaagctgcaaagaagacaacccaagtctggaggaccggtggatcgacatggtgattctactacttctaaatggtgtatattcaccaaggtggagtttgttagaataggtgtcgaatatactagtcctatttggttacaattagacttagagttgtaataggtgtcagacccggcaactctattaaatagagatgggggcaccacaatgtaaccatggtgactacaatgtagcgtagacactcagggagatgatggcggcgtgccatggactcgtagcggctaggtgctatattggttggggtggagcgcccataattagagccccggagatataggcttcggctgaacctcgttaacaaatatcgtgttttcttgtgtcgtcatctggcatgtctttggtgattaatgattaaagcgatcgggaaggttagtcgtcgtttcgctatatcgactaacttttataacatataccattaaagctggtccccctctacggtgtgcagtgtagcctcttacgtatcagatgttaacatgtgctttgaagccatgccctatatatgatggctcgtccttgttggttgattattaaccccatatttttataaccaaatctacaaatggcatgttaaatttatacgtgtcgaagtctcaaataaaatattttacatgcctatatatgtagatgaatggttagatttaaattttacatttatactgctgctagtggtatatggtacggtaaaagtgccgtatatagtattggactacatcggccctaggtactcctgctctacctattgtctgaactgaacacaggccactgtcatggtgtggaacagatgccaagttagatctaatatatattaggttatttgtttgatcggcgaaatatcacatttgggtttctcttacgggaaaggaaaaaaaattccaagttggctgacattagatcaacttggaataatatatattataaacatatgcacaatggaacgagggctaaatttatgttattttataaaaacaagcagcgcaaagctgctgtacttatgaataagaacaataatatcgtttgtccaagcacaccaatatgcataactgtgttttcaaatatgccttgttaaaagcatgaatcagattatatattcaaaccaataagatcatccactatgagctaatttaataatatagtcaacaactagccttaaaaattaaaatatcatttataaccaatctaatagagcacttatataataggtagttataaatatatattgtatcattaatatctaaccaatccggccatctctcacacatggttgaagcttgtgctataattggctacaaatctgtagcatgtttttcttctcttttctctacataagtacaaatgtgatataataacttgtacatctcaacataaaaaaaaagttgtgcatctcacttacatcacccgattatactcactctaattaattaacaagaaagtgtgataaatgcaagacacggcaccgatactatctatagtcaccaaacacaccacgcaattccaacattaaccggaaaaataattggatatagcagttcacgagttgtcaacccaatctagatggtaatccatctgataataaaaaacttttaaaattctgaattttttagtataatgaatttatcaaattatgaccatacttggattttaaggtaaatacatgtatgtggtttataaactgtgcatgataaatccgcatatcatatatgatagtccgtccattttatactataaaacattttaattttttaatgttattttaactaatttggtgttgtggatattgctaaatatttcaataaagtttgagtagaaaaaagcaatgcgtaaatttaatttatgaatggttagatctacacttatcaaagtctcaaataaaatattttacaggcttattcatgtagatgaatggtttgatttaaattttgtattcgcatactgtcgatagttctagatggtatgcttaaaagtgtcgtgtatattggactttgtcgatcgggcccgtaggtccatcgctgcctacagtcgattgactgaccacagggcacagtcatggtgtgtactagatatgacggcctattaggttattatagtttgatttggtgaaatgtcatgtttgagtttggcctgtttagtttccacatgaaaattttataccatgtcacatcgaacgtttaacacttggatgaattattaaatataagctaaaaaaataactaattacatagattgcgactaatttaagagacgaatcttttaagcctaattgctccatgatttgacaatgtggtactatagtaaacatttgctaatgacaaattaattaggcttaataaattcgtctcgcggtttactgacgggttctgtaattagtttttttattagtatccaaacaccccatacgacaccctatataatacccgatgtgacacgccaaaattttataccccagatctaaacgccccctttgtctcgtgggacagggaagaattccaagttggccgacatcatatcgtcaactcggagtaatatacaagaaggtgccctaggttgagtatcatccatttattgctttaatccaaggttttagttagattttattaatactacaagtaactaatatgtgcagtaaatattatggagggttgttgatgtaaaaacacgaggcctgggagatctgcttaactccagtgcaggtccaaaagcttgcctttagatgtatgagcgtgccagttgattttatcctgcaatcaacaagaaacaaagacaaaaaaaaccgcagttaaatccataaacgatagccgaccggctagttgccaatgatatatcatttatctttgagccgatgtcatatgtggatcgatcggcaataaagaataagtgagaaagaactaaatctactcgatcggctgtagatattaacaatatattatccttatgtcaatatatacttaaatcaagtgattgagatagatcagtcgtcttgccgagacagtataaatcacttagatcgaaatatatattaacaacaagactatatatgttcatagcatagccgatcagatagatctagcatgtatcggctaatactccgaaaccactctatattaagatatcaaggcaagtaaaatataccaaacaaaagactaatatacttaaatgcaacaagatcttaacatataaagggcggatttaacatgtcaatcaaacatataagataaatgtagttaaatctggtaaaatcggctgaaaccctgatgctaccccaatcggcaaccaaaggcaggctagagattgagattctaatcacgacttataagatcaaactcaactgctgcagctataagtttgaaaagaaggacgatatctagacaatcaagccgttgggtgttttatagagtggtagatatcctatataatctaagtcaacgtcgatatttaacctaattggctgccttctagtgacagacgctagccgattgaaggttagatagcgatattgcccaagattatgtaagatatatgataactcgacgaattacataaacaagattagagtatcataaagatggaagcacaaatcccgagaacgcaagctgccataacaagttttacctttagttgaagatcgaaaccgatgcagctcaacccgaaagtaagaactcgtcgaaacaaaacgaaagttttgtttgattacatggggctcggggtctatttatacccgagattacaaaatatgtccatatcggacacgacttttatctctaacaaactctaatataccataagtctttgcggcagacttttgcccaaacatatctctaaggaaattacatgaaatatcctaattaatagatacaaatgccttcttaggactctatcaatgcgtggcaatcctcatgaagtacatcaacccaacccaacaatgtataccgtgtcatattgtcggattcggctcaatcggataaccctatccaactcggactctgccaatcctgatcgcagccgattcagactccagccaatccttactctgtttccggaacggtctccatctcgaactccatctcgatttcttcttcatctccgatacttagattaccaaatttggttgttaacacatgccccccaagtccggaatatttggtaatgtttcggatttgccatatcctatctccgagagaatatcgcacttgccgtttttcgaccgttatcactctgctttaaatactaatcgttgtccccgagaaacttcacctcgttacttccgttttcaccgcttaagccaactctgtcctctctttctccagcgattcccttggtgcgcaaggtgatttccaggtgatctcctccccgacaaagtttccgcccgcggcgatgtcgacctccgccagcccgtcttctatgccatcagccgagtatgctgaggtatgtgcccatcggctaaatccctattctctgcgtagtagattggttttcttcatctcatcttgttttcttcttctctattccttctggtttcgtagcatctttccaatctggtcgcagttccaagtctgtcgcatgagaatcactattttcttggtctgattggtgatcttgaccccactgaattcatcattgccgaaaccaatagaatcccctttagattggccaaccctaatctaggtcactggaaaagcacctttaagtcttggccgtctcttgaaaaaacttcacctgaaaaaagttggattacgtggttcaagcgcgtatcggctagtaagcagacacactgggatgaaattggaatcggccaagcacttgccctaaccatagcaaattcagctaaggacgaacccttaatggccgctgccacatacttctggtctaacactatcaacgcctttctgttcaaccaagggccgatgaccccaactctgatcgacatcaccatgattactggattagatgtcacctcatcggctaatcctatgagtttgaacactaagaatcaatccgactttaggaccatgagcataggtggttggtctggttatttggcggcatatatgggcaaagggccagtcacctctcgggagcatgtagcctttctactaatgtggctagaaaaatttctcttctgtggatcaagctgcggccccacaaccaactggcaatttctagccgaagccctagaaacaaagagacaattccccttaggaaaaatcctcctcggctatctgtaccaaatgttgaacaatgcatcggttaagatagttgtcggctcagtggttggagcaggtggaccaaggtggctgctgcaaacttggttaaatctggtagtcacgaaagctgtcaattggccatctgtgacagaagctgaattcccaagactagagccgactacaaacgatgatggagaagaacgaacccaccacaggtgcatgtcttatggggaatttgcatccacaccagccgatgctggaacaaaactatcggctgagctgctcaaggattggttctgcagcttctatgaaggctttcagaaagatgcccgagtttggttcccttatgaagactcggtgaatcttgaagtcccatcagattttagatttaaagacatcaatcatgagagatatcaaaaatccagagaagtcttttcaactgcaattagcccatgcatccttcctgtcggcattcatcaaggaagaaacatacaagtttcttatgaattttatcacccaatgagctctgccagacagtttggaatgggccaactcccaatcggcttattttttactgacaaaattcaatgccgaggagaaatttcatcaacccttatgatggatcggctgctcaacatcccaggaccctctttgggcagcattgaaaacatagagctggcaaaattcagaagcagggcatttgacagatggtggggtgaatggaagctgcatctgttccaccaaccggcctctatgtatatgacagatctctttcctgatgttatccctcaggtacaccttaactttattaattttgtttgaacaattgttagccaattcataacttgactaatcttctcttctgacttgcagacaacaaaatcctcttctcctcaccagagcaaaagtggcagggacacagaatatgctccatgcctcattccaaatggaggtgggccatctccccctgtcatcggctaccatgccccccaagacttcaagtctgccccaagggcttattagagaaccagccgatgccggcaaaaagagaaggaccaaagcatcggctatagatccatcggctctggctccgaagaaaaaggccaaaacaaagaagaccaagccaaccgatgacttgcctgccctagatccatctatcgagcaagctctggatgaagaagaaattgaagaggatgttgacaaagctgtaaccaaagtaagtgatacagaaaaaactccatcggcttcacccaagaaaactcctccaactccttctgcaccggctcatttctcaagagtgaatatctatccttagtttctttttgcaattactctatccatagccgatcgcttataaatctcatctttgcagaagaaaaagattgctgtgaagaaaaaatcggcagcaacaacacttaaaccagctccaccggtaaaattgtttcatataaatcctttcaccaatcgatcataaccgattttacttaacacttgactttttgtagcctcctcctcctcctccttcttcccctgtacagcaatcaccaagtgatcaaactccatcggctacaggtagccatcatgtcgaggaagaagaacaaccagctgctcctgccatcccagtaagtcatgtttataaaaatcttgaatcggctgaataactcattttggtaatcaactatcttcaaacttcttcttgcaggccttagccgatctgttctctttcgatatccaagactatcttgatgaagaaatagaagcagacaccaccagcatggctttagctcccttttccaatgacgtgaagaaaacacttgaagacatctctcatcggctagaggcggcatcactagacagcttggtggtcgattgtgggttgatcagaacttggctacatgaagtgcaagctctgatcccatatgaattagtcaatgccctcactccggccgtccacctcgaacaacatcaattcaagctggagaaagccaagttaagactagccgaatgtcagaaacacaaggacattgaagccacaatccaggccaatcggcagcttgtgcacgaagagaaatccaagcttgatcagctatctgaaggcccgatcaagtcaaatattgatcggcttgaagctcgtaagattgagctcttggcacaacttcaagaatgcaacgccgaactggatctagaacacaaaaagctagccgatcccccgcaagctatcgaagaacagaaggcaaagctgaaatcggctatcaagaatgtcgttgatatgaccaagtccttaaaagtcatccctggaaccgatacacaagatgcccaagctattgaggaagtagaacaaattaggcaaagagctatatcagctatccagcgctatttgcttaagtgattttatgtgtaatagaccttaggaattttttgtaatcggctaagatactctggtactttatttaacttgtcttgataatcctttgtgccgattaatatagcaactgaattgctcaaaaattttcacttttacctcaattttgtttatatgtgcccccctaattttacaatgacgaaggcattgataaaattataacttgcactaagggagataaaaccatatcggacgtcatacatcggcaaaacacaaccgattatgttaatgacacaaaaatctactaagggcgatacaatcatatcggccgtcatacatcgtcaaaacttagccgattatgataataaaactgctaagggcgatatagccatatcgaccatctcaaggcgatgtaaacacatcggctatcatgtatcggcaacaccagccgatcaagaattaacccaaacgcttgggtaatatttcttcaagtatttttcattacgtgctcatccataaacttctccatcgagtccttgcaacatataagctcccttagatacaacgttgtagatttgaaacggcccttcccaatttggtgaccacttgtcgaatttgttatctcgagttcctattggcaaaatcaatttccacacaagttctctttcagaaaaagacttggacaccactttcttgttgtaatgtcgagcgacacgttccttatccttggtaacctttgcaagggctctcaatcttgattgaaccaagtcttccctttcgtcggccatgagatcataatattcatcggctgtcaaatcattttgcaactctgttcttcttgagccgattcaaacttcccatggcaaaacagcctcatgtccataaacaagcttataaggaggaacttggatcgaaccatgacaagccatccgataggaccacgatacttcggccaatcgagtatgccactgccgaggataatcggaaatctttcttttaatcaatttgatcaaacttttgttagttgcctcagctttcccattagcttgtgcataatatggtgaagaattcaacaacttgatacacatgctattggcaaactgaacaaactcatcggacacgaagatcgagccttgatcggtgatcatatcaattccccaacctctaaatggccacggtttaatgataggattcatagccgatgccggggctctttgaattgctctaaacttttgacaatcttgacaccccttgtaatatttgaaacaatcctccagcattgttggccaaaaataccctacacgtcgaagcaaccacttcatcttatgagccgattgatgagttccacaaattcattcatgtacctcaccgattgcaaccttagcttgatcaccactcaaacatttaagcaataccccatcaatcatccgataataaagctcatcatccaacaaggtatacttcaaagccttatagcgcaatttccgagaagccgattgggatggattttgcagataatgatgcacatcattcctccaatcatcggctgttattgtggcaatttctattttgacgtccttcatcatcgtcttgtaacccgatgtcccttgggccaaatcattagcttcaacattctgttctcgggacacatgcttcaaagtcactagccgaaatcctttcatcaattctcggcatttctcattgtaaaccattaatgtatcatttttgcactcgtattctcctgccaattgactgatcactagcgaagaatcacccataatctcaacagcatcggcttcaacttccttgagtaattgcaaccctttgagaatcgcttcatactcagcttgattgttagttgcataaggtttaatagtgtaagcaaactcaaaacttgccccccgaggggaaattataacaaagccgataccacaaccatgagtgcacactgatccatcgaaaaacaaagtccagggcacaatctcaaccgagccgattgaatcatcacgatgataaacaataaaatcggctatagcctgcccctcaatcgccatcagtgactcaaaccgaagatcaaactctgttaaggaaaatatccactttccaattcttccttttaaaattggagccgataacatgtacttgactacatcggccttgcatatcacagtgcattcattggacaatagataatgtcttaaccttgtacaagaaaaatacaagcacaaacacaatttctccataggagaatatcttgtttctgcatccaagagccgacgacttaaataaaacactactctttcttttccttcgagctcctgaatcaaaaccgagccaattgacttctcaccggctgatagatataatctaaaaggtatccccttctatggaggaatcaaaactggaggagagctaagatattctttaatactatccaaagccttctgctgctctgccccccaagtaaacttttgatcggctttcaatctcaacaaaggagtaaaaggttctaatcttccagacaaattagagataaaccttctaacaaaatttatcttgccgatcatctcctgcaattctgtcttgtcctacggaggttgaatcttcttgatcgcattaacagttctctgagttatttcaatccccctctcatgaacaagaaatcccaagaactggccagccgatacgccaaaagcacactttgtcggattcatcttcaggccatacttcctagtcctctcaaaatctttcctcaaattggctatgtggtcctctatttctttggacttaacaaccacatcatcaatatagacctcaaccaaccagccgattagatcatgatatatgtaattcatggccctttgatatgtagctctagcacttttcaagccaaaagtcatcacaacccactcaaataagtcgattgcaccaggacacctaaatgctatcttatggatgtcttcttcggccataaagatatgattataccctgcattaccatccataaaactgaaaatcttgtgtcctgaagcagcatcaaccagctgatcggctactggcattggatattcatcctttggggtagctttgtttaagtctcgaaaatcaatgcacaccctgactttgccatttttcttgataactggaactatgctagaaacccactcggcataccgacaaggacgaataaactagcatcatacaaacgtttaatttcagccttaacaggttcgagcatatcggctttgcatcttctcggaggctgctggttcaatctaacccccggtttgataggtagccgatgtttaacaatcaatcggctgagtcctggcatctcataatactcccaagcaaagcaatctctgaattcctttaaaagctctatcaagttggttctaaattccggagacaaattcttactaataaatgtcggccttggtcgatcacctggacctatatcaattttttctaaatcatcggccgacatgaaaccctatccttacttgtcatcgagatcatctaccatgtccttggtgtagacgtttgaaccctccacgacgccctcaaaataataacttgtgctctccgtctttaattggttgtatatcacaatcggacacttttagaaaatctccttcccgaacttttccaaacaagcaatcaatgtcgtccatctcccaaagtgctaaatcagcactggcaacgttaactgacctgtcggctggcacgatttcaatcttgtcgccttgccattgaatcaagcattcatgcatggttgaaggaatacaacagttagcatgaatccaatcccttccaagcaacaagctgtagcaacccttcccatcgatgacaaaaaatgttgtagggatggttttgctgccgactgtcagctccacattcaaaactccttttgtttccgatggattgccaccaaagtccttgagaagcatgttcgtcttgatgagatcttcagcattcctgcccagcttcctgaacgtagcatatggcatcaaattcacagcagccccaccatcaaccatcattttggacatcggcttcccattgacatagccgttaatgtacaatggcttaagatgccgattctctgtcccttctggcttctcaaaaactgcttgctctggtgacaaaaccaacctagccgaagcttcctcaacttcatcaaatcggcttgtttagctccaaattctgcaggtaacgtgaaaaccatgttgaccgatgcagtcacaacacttttccccttagccaatctttttgcttaatcggcttcgggttcatcggttacagcagctgggttcttaacacgccactcctgccttggctttgccttttttagccagtggttgatttcttgctcaacctcctgaaagcgttccctgttcctcaacctttgaacccttctcttctgattctttgtgaaaataccagaagaacaccattgagttttcctaccctcatcgtcctctaggtcacggtcttggtttactgggcccaacctttaatgaacaggaacccttgtttgcctcagccgattggctctgttgtaatatcggcttgaactttctgcaacattactgcatccaagacaatctttgatcgatggcagcctcataccctcgttccagcaaaatctgaaaaactcacagccccaatgaggatcaaaaccatcatcatcttcctcatagtacttctcatgctgcttatcatactttctctggtacttgttaataattttagccgaattcacttgaaaacctcgagattttcctccatcggctgttcggccggctgtatgcaccatattgacgagaaaaggattgccatcaaccttcatcggcttcttggaatcatcaaactttatttttcctccctcgatagccgcctgaatctgctgtctgaagactttgcaataattagtagaatgagacccagagttatgccacttgcaatatcttctcttgcctaattcatcagccgatgggattgtatgaccggcaggaagttcaatctgcttctcccgaagtaacagatcgaaaatcttttcagccttggaaatataaaaatcatacctctcttcttttccagaacttctcacccattggcatggtataactttcttgctcctaacccactcggttgctgctacatcagaatcatcatcatcatcgtcatcggatccatacatgtaaggacatacatgattgatctttttgaagctcttcttagcttctgcaaacctctgttcatgtaaggttactttctgtgcaagatgtgacaaactatcaaactcttgggatgagaatttctccttaattggagctatcataccctaaaaagccaaatcagctaaatgagcatcagtcaaactcaagctgtagcatctattcctcatctctctgaatctctgaatataatcctgcacaggctcatcatgcttttctctaatcgcggttagattagacaatttcatctcatgaactccactataaaagtaactatggaactgcttctccaaatcggcccaactgttgattgatccatatggcaaagaagaaaaccaagtaaaagccgatccagataaagacaaaggaaacaacctaactctcaaggcgtcgacaaccaatgcttcaccacactgagctaagaatcggctgacatgttcataggttgagacactgtcttgccctgagaattttgaaaaatctggaactttgtatcggttaggcaattgaaccctcttgaaccactcagggtatggatgccgatacaggtttccagtgtcctttggcttgagcccgaactgctctctcatcacatccgcaatcatatcggcccatggtcgttgctgaggcgccccctgcgcttgttgtggcacaggtttgaactgattgtattgaggagcaaactgaggctgagccgatcctccttgctgatactgaacctatggcgatggaggctgatattggtaattcaaattgcccccttgataattctgaaaattcggctatatgttgcgcaccaaatgttcgggaatgacttgaggtatcaccgattgatctggttgcacattatgaaccaaatgctcagggacaacttgagtcgtgacatgctatcttggctgattatcaagtgtcctcaacccagctgatgcatttagcaaaccttgctactgaatcagctgagtaatctgttgccttggtgtcgtctactgaatcagctgctgctgagctagatcaacagcaggctgagttggtagaaacatagcagcaacctgttcctgagtcagccgattcacattttggccggcatgttgcggctgttctctaatcaacaaccgaggattggccggtgccttgatgctgatgacggtgcaataggtgcaggagccgatactagtgctgtcggttgagctggtggtgcattaggagcagtcggctaattgttggtgatcaagggccaatagtttgggaaaacaccccctggtaaattaactggtcctgtagcctggtactcagctattgaaccatcaaccattgacttcaccaagttggacaaggtattgactaacacctcggattgattaatcaaagcatgttgcacggcatagtcaatccgatcttggaagttattgaactgtagctgtgccgtattaccatctgggccgagatcctcaccttgcaccccctgagaaccatcacctttatctcctgagccatctgcagcacctttaccacctaattcagttgtaccagctgggatttgttgtacttctccatccttggaagaacctatcctaggaacatcagcaactaatttcatcttatacctttgaacaattgttcctttacgggtctccatgaatgaattcaagaactggtgttgcgtttgctgcatcatcagatcgagctctttcttttgctcaggtgttagcttgtctacagtgatgggaacaatgtttccctcattaacttcaaacgcaccagactttagattattagtcttgggaggaagctctttgccagtcgaagatagcgacagtggcaactttttagccataagagaatgttgttgtgactcagacttctaatctgtcccaccaggcgtgccaaaatcgtgttgacgtaaaaacacgaggcctgggagatttgcttaactccagtacaggtccaaaagcttgcctttaggtgcatgagcgtgccagttgattttataccatgtcacatcgaacgtttgaacacttggatgaattattaaatataagctaaaaaataactaattacatagattgcgactaatttaagagacggatcttttaagcctaattgctccatgatttgacgatgtggtactatagtaaacatttgctaatgacagattaattaggcttaataaattcgtctcgcggtttactgacgggttctgtaattagtttttttattagtatccaaacaccccatgcgacaccctatataatacccgatgtgacacgccaaaactttataccccaaatctaaacaccccctttgtctcgtgggacagggaagaattccaagttggccgacatcatatcgtcaactcggagtaatatacaagaaggtgccctaggttgagtatcatccatttattgctttgatccaaggctttagttagattttattaatactacaagtaactaatatgtgcagtaaatattatggagggttgttaatgtaaaaacacgttgcctgggagatctacttaactccagtgcaggtccaaaagcttgcctttaggtgtatgagcgtgccagttgatttgatcctgcaatcaacaataaacaaagataaaaaaaccgcagttaaatccataaacgatagccgaccggctagttgccgatgacatatcatttatctttgagccaatgtcatatgtggatcgatcggcaataatgaataagtaagaaaaaactaatctactcgatcggctgtagatattaacgatatataatccttatgtcgatatatacttaaatcaagtgattgagatagattagtcgccatgccgagacagtataaatcacttagatcgaaatatatattaacaacaagactatatatgttcatagcatagccgatcaggtagatctagcatgtatcggctaatactccgataccactctatattaagatatcaatgcaagtaaaatataccaaacaaaagcctaatatacttaaatgcaacaagatcttaacatataaagggcggatttaacatgtcaatcaaacatataagataaatgtagttaaatcaggtaagatcggctgaaaccctgatactaccctaatcggcaaccaaaggtaggctggagattgagattctaatcacgacttataagatcaaactcaactggtgcagctataagtatgaaaagaaggacgatatctagacaatcaagccgttgggtgtttcatagagtggtagatatcctatataatctaagtcaacgtcgatatttaacctaatcggctaccttctagtgacagacgctagtcgattgaaggttagatagcgatattgccaaagattctttaagatatatgataactcgatgaattacataaacaagattagagtatcataaagatggaagcactaatcccgagaacgcaagccgccataacaagttttacctctaggtgaagatccaaaccgatgcagctcaacccgaaagcaagaactcgtcaaaacaaaatgaaagttttgtttgattacatagggctcggggtctatttatacctgggattacaaaatatgtccatatcggacacgactcttatctctaataaactctaagataccataagtctttgcagcagacttttgcccaaacatatctctaaggaaattacatgaaatatcctaattaatagatacaattgccttcttaggactctatccatgcgtggcaatcctcatgaagtacatcaacccaacccgacagtgtatgtagtgtcatattgtcggattcggctcaatcagctaaccctgtccaactcggactctgccgatcctgatcgcagccgattcagactctagccgatccttactctgtttccagaacggtctccatctcgaactccgtctcgatttcttcttcatctccgatacttagattaccaaatttggttgttaacaacagtgaaaattggaaatagttattcccgagtgcaccgtgcggtggtcttttcatgcttcggtgcactctcactgaccactatcccttgctctgagtggttttcctagtgttttcttggttctcctgatcatgaggagagtagacgaggagcttggatggttctatcaactcaagtttccaatgggctaggccagaggcgatcacaggatctgcagttttgctttccatgactagaagtaaccatgctcttcaacttggggcttgtactctttgggcaacgatgcaaaatcatcacaccgccataatacctcagcccctcgcaggcctcaccgccacctaggctggtcaccgaaaccgagcagcaatgaagatggtggtggcggggccttcctccatccgtccttcctgactttttttctgcaggctgcgttgaatggtggccatggagacggtgatggagttgatctggctggctcctcaaccagatctaggaggagatgaaggttgtgatggggatagaaggctggagcgcaacaacggtggtctaccttgacgctggcgagaatggtggtggctagatctgccccatacttgccaggtccagtgtccacggctagatccgacaactccccagcgagatagctgtgatagctcagtggatgtggtgacctgccggcagggcaatggcactgtggaggtgacaagagtttctaggtctggctctttggccaaatctagcgtctcccatatggttttgacgtccctttggcaccaagggtcagcactctatgacgacaatagaggtcacggtcttcataggagggagagcatactgcgcaacgtggatgattgtattaagcctcaggggtggtgtatatatagagtacaagagataaggaagtggatctatagataagaaatactacaatacatatcaatcctatcctaaaatctctctaactaccatatactctaacatcccccacaatccaagcttgagtactgtggatgcttagactggagaagacactgataggaggactcaaaaatgctaacccttcgtatcgtaatagatggctagccaaagcgaagggtgcgaactagcaatggtcaagctagtcgtgcatagagtagctatggtcgatatagccaaagtcgagtgttaacgatgagtgagctagccaagccacggagctcacaaggagcaccaagtaatggtcaccggtgtgtgggatgatgtcgtggaccaaggtgcgcgacaacgcgctgaagacaaagaaagtgatgtagtctgtgctaggcggaccagaggtcgtacccacctccccatccttaacaatgtcaggggcaggcatgtcgcttgaggaaggtaggtcgatcatcgcgacatcaggacatccgccttgctggatgtcctcaggatctacgcagctacgaaggaaagtaacacgacaaatcaacaaatggcgcgaagtaaaagaagtcgttccgcccacagaacaacaaaagtgtttgtacaatatctacaatacaagacggagaaagtttactcctcataaagggggaggatgctctcccagagatccgacacactggacatcatgtcctcccccgtggcattagccacacccttcaacaagatctccttgaggtcgacgccatggagagctagcttcacacaaaagaggacgtgacatgcccccatgtggattccgttggagatctcctccgcagcgtgggctatgtgccgcggcgggatggcatccatctcgcctgccagctccgacaatgccgatgtcagcgacgtctcgtcggggtgcgccgggatagaagactccacgccgcacgacaacgccagttggtgcaggctggtgaagctcttgcggagggagtcgcggagagagaagaggatgtcctacgtgtcgttcatcttcttctccaagccctggcgttgcatctcgttgccggccacgatctccttcatcttttaaaggtcttcatgggcaacctcgagttgtgcctccagctgggccacccttccgtccgccgccgtcgcgcgggccaccacacgatccatctgggccaccaccgcccgagaactgttctcgaggaggcggtggcattcggccaccatgtcagaccaagtggctattttgggcggcggcgcggtcacaggagcagtagcagatcccgcggacttagcgacaacaggagccacctccacacgagggatgatagcggcgggggatccactcgtcacctcctctctcccgctttgcacggagatcgccgatgctttcctgtcaaggtcagcagatatcatcagcaaatgtcaaaagatacgataacggagttggtcaagagtttcacttacttgccggcgggcagctttaacgtcctcctctttggaggagccagactgcccgtgtcctgcataagatagcaaatcatgaccccattccaatatctctaaaaaggagtcaaagggcaacgacggtgcgctttaccttggagccggcagatttctgccaagaactggcgggagcgctcgatctcgctcagggcttccgcttggtcccgctgccccctgcgatggcgggaacggaggagacattggcgacttcatcggcaaccttctccttcagcgaggcggaggcctggtggtcaacaaggggactgataacatccgtcaatggcaaggcctacaggagctgaagtcactttggccctttaaaagaataaagacacgacgtgcccccgttctcgcttacattgatggtggcaaccttctcggctgccgacttgtcgcagagcgggaccggtggctcgtcaaccgtggaggcagcagtgatcaagacctccttgacccgctgcgtcacgatgtcaacagaaagatctgaaacagaagaagatacaagaagataagaatagatctcgtctgcaaattcaacatcaaaaataagaagaagatacaacacaaggacaaataccccgcgaagaaattcgagttacgtcctcaactcctatgtagtcgaatgcgggatgagcatgggcttgcagcggttggatccgacgactaacgaagtcttcgacgacttcatagtcggtcagtcctcactcgcgaagctcactcacggcattgacaaaggcttggagagagggtgttaatggaggtttcgaggtccagtcctcagaacgctccggttggacctcaggcacaacaagaatcgggtcgagttctttgagctcgaggtacaaccatctcgatctccattggctccgggatgtgtggcattggagagggatgtatttcgcctccatgccgtcacgaaggcgaaactcacaacatcccgaaacccgatttgcttccatccaccggagttcgtagaagaagtgaaagaggtcaaggagaggtactaccctaatttaggcctcgcagaggtgagcaaaaatgctcaagaaagcgatggaattggggtttaggtgcaagagagaaaggccgttgaagttcaagaccaataaaagaaattcggaaggaggaggtaggaaaccgcatcggacgaaatcctctacagctcccatatgacctaggatgggggaaggattagtacctcatgcttccctcgccatgatctgctttggagggatagccccctcagtgtacagcttcttcaacgcagccgcgtcggaggaagactggtcaaggtctgccattggaaagaggtcaccggaagaggatcgccggtggaaagtgtcgaagattggggaaacggagagtccgagagagccggggaatagtaagggtttttctagcaggcggacttgaaattgatcctaaaattccattaaataggcgcatacctaacggttcgtatttcgaggaaaggggagagattgccgctaaaatttcctgaggcccgttaaaggccgttgttcagacttcaatttaaattcaaagttcacattgatgggctccctgtaagtgttgtcgatagctccatgtctctacggttagacaaccgagatcgatctagcgagtacgacaacgcgttatcaggagaagtcgcgtgcgataacctgaattcatttaagttgaagttgggggctactgtcagggttacggataaggcaatgtcagggttacggataaggcataccctctatcctatgatttatgaaatataccgaaaaggtataccttcacgtgtacggatcgttttcgtctacgccgttaggaatttatctcaagttatggaaaatatctctatgatttaataaattgccggagtcctactcagagggggaaaaatctctggttatatcgtgccaatttacatatccctaagtcttacttgagggtcaaggtattccatggtataaaagggacccctagggagaggcgaagggcattgaatctcatcgccaatacatccaccagagtttacgaagccggagtatgcggagccaactcgctgggagatctcgttgaatccctcgactacgatctcgtcgatatcgcctgtttcggttactctctttgtaatatgttctcatcatcatcaatcccatataaactggactagggctattaactgataaggggcctgaaccagtataatccttgtcttttgtctgttttgatatcgtactacgtagtcccctgctcctacgtaccccaatactctattcattcgatccgtgagtatcactcgtcgacagttaggcatggtggactagacggctctcgataactaacaggcgcatgacacctatgtgcctagggtaagaaaagacgtgctacgtgaaacatatttactggtgacatcgcacagggttgctcatcggtaccattaactgttatgtcattctaacggaattgaaccccgtgctctaactgccctctttattactccctctgtcccaaaatataagtatttttagaatagtgccaagtcaaacattcttaactttgactattaatagcaaaaatataaaacaaatcaatcatgtactccctccgtcccattttaagtgcagccatggttttccgtgccaactttgatcgtccgtcttatttgaaattttttaaaaaaaaaacttaaaaacataagtcacgagtaaagtactattcatgttttatcatctcataacaacacaaatactaattataattttttttcaaataagacaaataatcaaagttagacgcggaaacttatggttgcacttaaaatgggacggacggagtaaaattgatgttactagatttatcattaaacaaactctcgtaatgtcactactacagaaagggccataggtgccggttcccaaccggctataggtgccggtttcctaaccgacacctattgctcggcaccaatactagcaaccggcaccaatgaagaaaataaaccggcacctttagctttgctcaagccaaaaaaaaaagaccggctcggctcgaattgagccgagctcactgcgcactgtcactgcgtcatcgcccaagttgctcccaaatcaaattaaaatccccaaaatcctcaaatccccaaatcatccacaaatcgccaccaaaatcaattgacatcacagtatgaacatactccaatccacaaatccaccaaaacatctaaaaaaatcatccacaaatccacaaaaacatctaaaataaatctacaagagacgagggaggagagctcgcttcatgctccaccatctgcttcgtcgctggtgagccgctcttctgccaccgcccaccgcctcccctccgccagatccgccacccgccgcctcccctcctgccagatccggcggaggggagggcgttgccgccaccgcccaccgcctcccctcctgccagatccggtggaggggagggcgccgcctccgcccgtcgcccgctgccgccgcgcgcgatatagagaggtgagtgagacgagaagcaagagagaaagaggcaagagagaacgagagaaattcagagaagacgagagaagacgaggcgataaggttctcatataggataaggccaatggttagctcggctcggctcggcagcttggatagctgccggtttttttaaaaaaccgacacctataatttattattggtgacacctataatttattattggtgtcggttctaaagaaaaactgacacctatagtataggtgttggtttttctttagaaaaccggcacctgtattttattaaaggtgtcgggtttttttaaaaaaccagcacctatactataggtgtcggttcttctttagaaccggcacttatagttgcttaaaggtgtcggttttatgtgttttcagcccacggaagagggaaaagcattataggtgccggttttagttgttccggcacctatagtgctgatctctataagctttttttactagtgtgtgcaactcatttcatttaaaacatcttacttttgtagatattgttggttaaagtagcatctcaaagactgtgtcgagtttaaaaatgcttatagtttgagacggaaggagtatatatgaggatatctccggcctataattgtgtttgtcaattttctcgtcacggcaactaaggcaacagccagccattttgtgtttttggcaaaaaatttggatccgctagcacacgggtgctagctggaggccgaactcgagctggccagccttgtcgtggtcgtgcatttgccccggccgctcctagagaagtgcccgcagtcgtacgattcctgaatttgttcacggtcttgagaaaaatatcaggttcacgcgcgcgcggccagccgggcgcgccaaccttggagacaaatcccaaaggaaaaaatagccacgctgcaggcgcaaatatgtgcttcgccgtaacgccgaggattatttagggtgcctaaattggctatctcctctccgctccataagttcgacaacacgcggtggcggcgtggggctgcaccgaaccgccgcagagagtcgcatcgcatgcaaccacgcctcccgcttttactccctcccactgccgctgccgctgccgcttttcacgtcgttctcccaattaaacctcccatctctctcgcgtcgcagcagtgccctcccacggtctcagcttaataattaattagtccaaaaaaaggatattacaccaccgaccagcatgccggcggcgtcgtcggggccgcaccgccagctgctcggcggcatcctcctcctcctactcctgctgctggggcggacggcggcggtgggggcgcgggtgacggcggtgatcgtgttcggcgactcgacggtggacgccgggaacaacaacgcggtgcagacggtggtgcggagcaacttcccgccctatggccgcgacttcccgggccgccgcgccactgggcgcttctgcaatggccgcctcgccaccgacttctactccgaggcctacggcctccgccccttcgtcccggcctacctcgacccggactacggcatccgggacttcgccaccggcgtctgcttcgcttccgcgggctccggcctcgacgtcaccaccgccggcgtcttcgtgagtaaactactcactcctactctgtattttactttgtttctgctgcttttttctttatttttttttccatttttttttccaatcaacaacttacttttcgggtttcaaaataaactccaattaaaatgagacgttttttcttttactttgaaaaggctaaggaaattaagcttactaaaaaaaatacgcaacatgcatattctgaaaagagaaacaagcgcgcaaacgaagaataatatagataactgttccattgttattacaaattctttcttttttatatgtcttggtatttttatttattatccaaagctccgaattgactaaataaaacatgaaacatagattcctaagtattcctactaattcatttacgtaagaaacgcgtctaaattaaattaattaagaggaaggttttcttgtgcatttaactcgtcgtatcaggttttcaaaaaaaaaaaaaactcgtcgtatcaacttattgcagtactgtaggagtggtggtttttctctatcttttggtgagccaaacaggatgttactgatcaaacagttaaacacaggctggccgctgtcacttgtcagatagtagaacggtgcaatgcaatgcgctttttgtcgtacgagatgcctgatgcttgtctatacatgtcaacgtatcgaagaccatgcatgcccatatatactccgtaaccagtagtgtactctcatatagagcccatcacgtagctactgccccgtcccagaactgactactttattttaatctgaacaagtgatatttatattcatgtagataagtaaacttttctttttacgaatatacattttatgtcttaatataagtgcatctagcatcgatatgatattttatattataatgaatatggataattagctgttcaaattcgttatattataaaatatcacatctaattttagatacacttatattgaggtgatgagatgaagggagtagtactcattgtaagatgcttttgaatttttttcaacaaacttccttaagtttgactaaaattatgaaaaattgcaatatccgtaataccaaattagttttattaaatttaatactaaatatattttagtagtatgtttatcttgtattgaaaatattgctatgtctttttatatatttgatcaaatataaaatatttaactaaaagaaaatgaaaacgtcttataatataaaatggaaagagtaattcttatgattcttttcttttatttctttggaggtgaaactctttaattatgttagtgtcttcgaaaccgttttggtttcctcaaaattccgtcaccccttagtgcttttagagctctaaacggtatgtgaacgccatgttccttataactatttcatcaaattattaccgtcaattatttgtcctacgtatataaaaatacatgttctaataaataaactccttgtaccacattgcttattgcttagatcccttattctaagctatttatcaagtttattcaccacaatatttagtttgtatttatcatgcagataattcactgcaataatctggtcactaagggtgagttataaacagagtataggaatggctgattagccgcatgcaaaacgataatatgattagcatataattagttgtgtatcaattattaaaaattaaaaataacattatttaatttttaaaagcaaattttatattttttaataaaatatattatttagcagtttgaaaagcattcaaacgaaaatcgagaaaatagtcaattcaatcttcactttagaacagccccttagactaaatttcacctcggcgctgatcttgtatgcatgtgtgcttatcgactggagtactggagtatgttctttatgaataaaaagctttagaaagattaagttcaaaatccacatgtgtacaagtacaaacaaatatccctctccccacacatacgaatggggcacaaaatccacattggtccactgatcggtcagttgctcgatcgcgcactgctactgctggactactagtctcggtcccggtggcatttactgctaagtcaggcgaaatgacactatgccatgtgtgtgcaaggaactgttgtcagcggcaagcaatcatcattttcgcaaggccattaacgtttgtgtgttttgtccgtgcccccaccacactaaaattgttggagctttcctccctgctatgtgcgccggcttcgaaagttcagcttctacgtaagcacagagaatggtctggaatctggagccgatttgaatgctaggaagatcgatgcttgctactccatctatcctaaaaataatcttttttaaatttatattaccagactagattgctatacgaataaagttgttaggccatgtagaacgtggtaccttataactgtggtctcaagttccagctaggttcggataccacgctggaggtttgaagtggtctcgtagggtagcagagaagcttgcagaggtaactatgatttatggtggctttaggagagagaagatgggtttatgttgtccaagagagaaccaatacgtgcccacgctgaggttgtgacttcactcggtcgtggccactacaccccgccgctgcatgacccgccgtatccgcaacccgtcgctgccgaggtcgttgctacactccatcacgactactacaacccgtcgccgtcgtcgaggtcgtcgtctgatgatctgctccccgcccttgtcgcaccgcacggatccagcaagaacgaggtcggatccaccacctaggatcccatcgcagtggccggaaaggaagcttcgatccgcgccaatagtggcggctcgatctcgctggtggagaggggagagaacttccacgccactaatcttgtcaacctatgtggagaggagctcgtcgcggtggccggggggggggggggagggaagagaggtcaggagtgagcccgtcacgacggcaaggagggacatacgctggcagacaaaggaaaggaggcgttgaccgtggcggaagccgcccagatctacatcgatggctgggaagggagccgcctcgattcatgccaacggtggtgtcgtggagggagccacctcgatccacgctgcctaggacctgtcgcccgtcacggtggccgggaggaagcctcaatccgtgctgatctcgttgccctccgcctaggagttcatcagcccacgacggcccagtttgcgggaagagagaatggagaggcggctccgccgaggaggagaggggagcttcaccgacgttgaaagggaagagagagagatgagagaatagcaccgacagtgatgcctctggttcggtggggattccgtgggggagaggggtgggtgaggatattgaaagtgatagactgatagtgggaccgttaaagtttagggtatatatgtgtttttttttgtcatagggtctaaagtataaaaatttcaatcatctaaaaataaaatatttaagaagggttgacatgtaaaatcttaggggccgaaataaaaataccactttacagtagcctccattgtaaagaggtgtgacttcttttggccttaactatgtgacatcttggggctatttgatgccatttttaaacatactcctgccaaaaaagtgactacgtttagtttgttgccaaactttaaaaaatacataagaaatcctactaaaatttttggcattgtcaaaatttggtaagatttattttggcaaattgaacagccccctcgagaccacttgtaaccgtggctttcgtgtccttaggatgtactccctccgtcctatataaaaaccaacctaatactgaatgtgacacatcctagttctacgaatctggacatacatatgtctaggttcattgtactagaatatgtcacattcagtactagattcggttttttgggacggagggagtagcgaaaaaggctaagatcttatatatacaatagaatggttcttttttttttgagaacaaaggaaatttattcattagaagcatagtacatgatgaatgttgtcattctcagctgaaagagctggatgaagggcagctatttggaacagaggagtgagttacattttggcatgagtaaattgcacttacggtgcaacaacttggcaggtgggtgtaatttggtgcaataacttgaaaatgaacgttctagtgcaacaacttggtaggaaggtgcaatttagtataagaactttataagtgatcgtataaatacaacaacttgtaaaataggtaggattttgatacaataaattaagaagttatgtgacaacttaattatttagagcattttttatataaattaaaatttttaaagtacttattttgacaatatactagcatgatctatataaatatatttatatttttatcctaataactaataactgaaagtcaattaaactggattaagaaattattatatttcagttgataattgagaaggtgaagaaaacaaaaaattcttaaaggtaattggatgtaaattgtatgtgcaacataattcttaaatattaaattcatatataaggtaatatccgtatgatcattgtgtattggcatactgacatcgtgaaaaatctcatctagcatatgcttagctaaattaattcaataaaatactaaattattaagttcttatactagaacgtacccacttgtcaagttgttgcactcggatgttcaattctaaagttctagcactatattgcactcacctgctaagttgttttatcgtgggtgtaatttactcttttggcatactaattgagctgcttgagaatttgtcgattgtctagccttttttaatggttcttttaactaaaatcttaaaatcgtactacacaagcgagattttgacaactttgaccgagactagtaaattactacaagtaattattagtagaagaattaattgcaaagagacacgcaggagagattggagagaggagacaagctagaaaaggcaaaggggatggtggtatatttattttgctcgaggctaggtcccacgttaaggttggtatggattttaaacacgaatttaaccttttctgttatggaacaaagttgtgaagcattgcagaagcatcactgccagattttgtcagatgtgcccgcaatgatcttcttgatcatcttctcgtctacaatgctctctttgcctctttcccgtgcgctatttagcacaaaagaaacgccttttccaagtattttgggaactttttccgtgtgctttaggtatggatcggaataacttttaaaaaatttcacttcgctattaaataaagtgctacagtaaatcacacatgctaatgacaggttaattaggctaaaaatattcgtctcgcggtttccagacgagttatgaaattaggtttttcattcgtgtccgaaaaccccttccgacatccggtcaaatatccaatgtgacacctaaaaattttttttttgcgaattaaacaggccacaaacagggattttacgtactatgagaaagtacatccacttgtgacttgtgcctttaatttgacccaagcatgagaatttaattagagtaaagtccatcaccggtccctaaacttgtacctgtaccgctgtgtcattccagtcactaaactcacaaatcgaccgtttaggttctcaaacttgttcgactgtatcatctcggtccctaaacttgtagatcactcgtttaggtcatccaacttgttcagttgtgtcaccccggtctctaaacttggatttgatatcatctgggtcaaataggacgatctaaagactttatatttaaaaataattcataactttttcatgtgaactctaatgaagacaaactttatatcaaacttgtagccctcgacgcggtctacaactttgtagttgaattttttttattgtaagtcatttttttgtcccaaaatgtaattttaaaattaaaatttcaaaatctataaacatacaacaatattttaggaccctaaacagttttaattcaaaaacttttcaactacaaagttgtaggtcacgtcgagcgatataattttgatataaagtttgtcttcattagagtccacatgaaaaagttatgaattatattttgatataaagtttttagaccatcctatttagggaccggggtgacacaactgaataagttggaggatctcaacgagtgatctgcaagtttagggaccgagatgacacagtcgaacaagtttaagtacctgaacgatcgatttgcgagtttagggaccgggataacacagcgatacaagtttagggaccggtgatggactttactcatttaattattgcaccaacaaaaataaatatatccttccgttttatgcatgataattactacatttccatataaaatcataagctcatgtagaacttgtgactagctccttttgccctaccgcgaacaccgttaattgaaggaatggctaatattatcttgcctcttggagaattttatatattcccttgatttgataatataaagggcaaccactttttttaatatttcatagtataaggtgtgatacgtgatacaattaactacactactacaaaactgataattcgtaacgggttataatccttatctatggcagatggatgtctggtcatagttgaatgatcagtattgtgaaaaccacatatctgtcacatccccttccatcaccgatgacatttatctctgaagggttgtaaccataacccatcaccgatgtggatattgggaaaaaataaagtttatgcaacaatgctcgtcactgatgcaaaatacccatgaaaaggaacaacaatatcaaggttcccatccaaagctcttcgtcgtcgtcattgtccccatcactgtagtcgctgtcgctgcggccagcctgaactatggaactaccgaggtccccgaggtgggggcgatcagatcaagttgttgaaagctctagggcagccagatccagttgcttctaacctccaaaaggccagatctggcgcccttaaggtggcggcgactgaccctgaccttgaacgagtgacaatgacactggcgatggaggcatgtggaggagagccgacgaacgggacagccacacaaagacagatgtgccatcagtcccaaccctgaccgtgaccgtaaccacatgccgcaaatctggctatccccaccccagaggcgaagggcgaaagacggaaggccgacgctcgtgaggaggagctggtggccgctcatggatctataagtggagggagagacgaggaggtggctggtactcggggtcgtagacggtggcgacaacggtgcttgggaggcagacatggagatgaggagacaatcggtattggatccaccaccctcagggtcagagtggcaagatctagccgctgcgcgccaccaccatgtactagatggctggatccattgtctgggaaaggaagagagatcaagatagaaagagaggcagtgagagagagagtttgagaaactgaggctgagaaaagaggagtggccacgttgaggtggaggagaaaaaaaattgaagggtagggtgtggtaggtgggagatacgggttttattgttgttgtacccgttggagatatgaggtgaccggtaatgggacataaatagtcatctttcacgggccgatagcttgcacctgtcaacgatgatccatcggtgatagggcgccttggctgcggtaggtcacatatgtcctgtgttgagccacaaattcatcccgtcaaagatgagggttaacggtgacaggttcggccgtgaggacgtatctttaatcggtcatattaattctaccccatcacaagtgtgtgcttttgtaacaggctgtaggtctccgtaatagatgggccaataaagatgctagattttgtagtaacgctagcacatatttctctccttatttttttaaaaaaattctttgaccttaaaatctttaattctagaatgtggtgcatgtgttttatttgaaagaatctattcaatatcctttaatctactctaaataaaacagtaaggtgataaatattttttctttggttgcgccttacattttagggcagatggaggactatttatagaagttaaaattattctgtttaataaaaacatatatatatatatatatatatatatatatatatatatatatatatatatatatatatatatatttactgtcatggatataattccatcatacttcatcttgtgatcctctcgtcataaatattcaacgatgatgacaatatccaatcaaagtaaacatttcatatcagttatcgctcaaatactcacattaaaaataaaaaatggtaggccgaaatttgatttgagaaaataatatcacaatacaataaacatattaatttttcaaatttattttaatattaatataaactgatagtcagaatccaaaagtttgaccgagtcattttctagaaatttattatgatgcgagggaataattgtttctaaattaagtttatacaatctaattagtttaagactataaaatttaataagtttatgcgacgacgaaactttgaaatctgcacaacattttcgtacttgtcaaacttgttggtactcaagatttaaaatttggggcaattgcttatttgacctcgttttgaattctaattgccgatttgaccctactttctgaactttgcttatttgacccttattttcgagtacgaagctctggtctgactctattccgtttgtgtgaggtgacggtgttaattttggggtaaatagttcattttgcccttgcttatttggccctgttatatcttgtttgtttgcttatttgacctaaagtttggataatataaaaaaaaaatctctttccccagcggcggcggcggcgcacccgcggaggaagacggaggccggcgcgcgctggggggagagagcggtgccctgtgctcttcgccacagcgtcgtcgtcgtcgtcgttgccgaccggcggtggcgcgcggggaagaagattgaggccgacgtgcacggggagggagggagtggagggagtggcccctgtgatcttcgccgtggcgtcgtcgtcgtcgttgccgacccggcggcggcgcgcgcggaggaagacagaagccggcccgcagacagagggaggaaggcgctggagctcaccggcgtgcggagggcgggcggcggcatcacgcacgcggagaaaggaggaggctggcgcgcgtggagtggtgacggcgcggcgccgaagctcaccagctcgcgggagagagacgccgccgccgccggatctgcggctcgtacacccagcagccgccggatccaccgcttgcacaccgccacggcctgagctccaccaccgttgctcctcctccttgtcatcgagctcaccgtcgccgccatgacagctcggcgccaccgcccccacagctcggcgtcgctgcccccacagatcggcgccgccccgcgccccatcagaccgccgccaccgccgctgccctccacctccacagcgggcgccggcggggctgtacatcacgccgccgccccctcaaatcggcgccgactcggaccccctcaaagtgccgtcgccaccgccctccaccacaacgagtgggcgccggcggggcagtgcttgacgccgcctccgctgccccctcagctcgccgccaccgccgcccccttagctagctgccaccgcacgcgtaggtcgtcgccgccgctgcacgcacgagtgagagagaggtgagaccgtgagagtcacgcacgagtgagagagagagagtcaaaatagggtttggagggtattttcgtcactaggaagtcttgaaacattttcttttttaaaaaaatcgaaccctaacggagtcatcaaaagagggtcagaggaagcttcgtactcgaaaaagagggtcaaataagcaaagtttaaaaagtagggccaaatcagcaattacagttcaaaacagggtcaaataagcaattgtcccttaaaattttgatgaaaaaaaaggttaacttcatatgtgttaatcgaaaggagtatcaaataccaatgaatctcaacaagtcatcaaaatataattgttcagtgtatgtttagattccataacgctgataacttttctcatgaaatttaatagttctcgttactctcttattcctcgagtagaaaaaaatatccgtgtgttataacgggtaaaggctgagcaataaaataaaacactggaatcactattatacactataattgaaaagatttattaaaatccttgcttggttttgggctaaaagtccactatttctttccttttcagccctagcccggtccgttgactcctacctccttacactcggcttacctctcttcggctcaagccataactgaagtcgcagacctacctagcacagtcgattgccttctctcgctgccaacctagacccatgcgctatagtagcatcttcaacctccaggcgatagtcccatgcccgtacgatgccggagtgaatcgtctccataaaatccgttcgaatttttctcgatctcccaaaattggttgagggcttttgatctactcgatctcctcttttgatccattcgacctcttctcttcgtttcccctcaaatcggagtgaatccgcatccaaatcgtcgtaaccaattccgcaaaactcgggataaaaacgtgcacacgcggggcgacgcgaatgaatcacttagcggcgcttggatttgatgaacgaacaaaattttggtggaagcatatttcattttttcaagtaggtaaagattatcacttactgtcgatgagtgatactcgcggaccggatgtgtagagtattggggtacgttggaacgagggtctacgtagtacgatatcaagcagacaaaagacaaagattgtactggttcaggccccttatcaggtaatagccctagtccagtttatatgggattcatgatgatgagaacagattacaaagagagtagtcgaaacagatggtaccaatgagatcgtagtcaagggattcgacgagatctcccggcgtcttgtctccatttactccggcttcgtaaaatttggtgggtgtgttggcgattgaattggatgccctgagcccctcccagggggtcttttttataccgtggatcatcttgccccccaagaaagatttgaggatatcggacctggtacggtataacaaaaactctatccctttcgagtaggactttggaaatcacttgactcgtagagatattttctataatttgaaacagtttccacacgacatttacgagaacaatccgcgtacgtgaaggcataccttatcggtatattccataagtcgaagtcgtaggatagggggtataccttatctgtaaccctgacacttactacttaccacgccaaatggttgagcaattaactattttgattttttttataattttttttgaaataaacatatattactagtataaattataaaatagttcattagaaaaattaaaacttagatgtaaataattaatggcaataacaacaaagctacagataagatgaaagaaatacgaagtgagcgtatctcaactggttaggttccttgtggtgaaacgcactcacctgagttcaagttcttggcatagatgtttatatttatgacttattaaatttttttaatattaggtgactcgttgataaagagacgtctatggtaacttcgttaatataatgatacatcggacttttggaagggaaactattttgatccctcgagggaatatctcctcgttgtttgcatgttacccaaatggttatgaaaaaaactaaaaaattttgggaagatgtattaacatgtgatacaacactctacaaacatgcaagtttaaattcaacttctatgtctcgcaacgaaaaaaaattaaactatagctagttaacgtatattcaccgttaattttttttttacatagaagttgaatttgaacttgtatgtttgtggagtgatatatcacatgttaatacatcttcttttcttttcaaattttttcacaactatttaagtggcatgtcccacttcccttttggaggtgctcatataagtataggacgagtgtaccgtggtgaaaaaagaaaaactaaaattacacgttacattacatggcattgtaattttaggcttggccattagccatctgcaattctaagttactaaaaaaattgttttaaaaaaaaactaaaaaagttgcaaatcccaactatttacgctgtgtgtgtgtcatggtttgcagtcggtgatcccgctgtggaagcaagtagactacttccgggagtacaagcggcggctggcggcgcacctgggcgcggcggaggcggaggcggtggtgtcggatgcggtgtacgccatcagcatgggcaccaacgacttcatcgagaactacttcgcggggacgacgcggcggtacctgcagttcggggtgggcgagtacaccgacttcctggtgggcctcgcccgtggcctcctcgtggagctctacggcctcggcgcgcgcaaggtcgccttcacggggctcgccgccgcgggctgcctcccgctggtccgcgcccgccgcatgatgttctgcgccgaggagtacaacgccgcggccagggccttcaacggcgcgctccgcggcatgatcgccgagctcgccgacggcctgcccggcgcgcagctccgcttcgccgacgtctacgacttcttcgccgacatcctcggcgacccggcacgatacggcaagccatgcatatatcgctaacgcggatcgatctcgttctcgtggttgggtgggtttgggactttggggcgttgcatgcattttgctggactgacacgacacgacacgacactggtgggggtgtactgcaggtttcgtgaaggcggaggtgggatgctgcgggacggggacgtacgagatggggtacacgtgcagcgcgtgggacgcgaggacgtgcagggacgcggacaggtacgtgttctgggacgccgtgcaccccaccgagcgggccaaccggatcatcgccgaatacctcttcaacaccaccttctcccacttcctctgatcgatccaattcatcttcgacttacttgtagtattaattcatttaggagtagtagtataattttggggtaatatattgatattggattcgattcgattttattagcttctctcttgcattggaagccccgttagtattggtatgccactatgcccatcgtgcccaacgacgagatcgatccatccatccatcgaacagatgtaggagtagttctgcactcatcatgttagcaatagatgaatagaaaagttattcactccacctactgtcactgccgtgcatatgctttcgggcatggtttatataccgtttccgacgtgaaaagtggtcacggtcggtttatggaaaaccataaaaactggaagcacaaaaaaccagctaaaccacctggttttcttgaaaaccgataggaattacgaaccttatttcctggcaaatataagctacagagtacaattcggttacattttttttatcaacccgttaaatttttctcccaaaaataagagttgattttcttgaaattaactcaaaactaatcggtttccatttacggatccatagaaaaataactagctagaagaatagtgacgttttgatggcagcacggatgtgctctcccttaagagcagaactgattctcaaatcaagtctccagaatttagacatagcagcatagaatattccaaaagctacagggaagaaaaaactaccgaacgatatcatcaagcaggagcgcaaacagggaacaagtaaaaacaatcagctgaacaagtcctactgagctccaaattttattctgctctgctactcaaaattgtgtcaaactgaactgaattgtacagactagtcaaggtacatacacggatgtacagccgggatccaagctagctaccctaccacaacattgctacaactctgcccatctacacccacctggttctttccttccgggcgggtggattgatggatctcaccatcctcgccctcgccctcacctccctaccggagttctgaactgaaaccgccatccacgatgacaagaacagagttgccggaaaccgggttttgcaggtaaaagaacgtgcagggcgcaacgcaacactctacacacttgcctgtcgctaccacgagcagctggtgatgatgcactgatcgctagttgtgagacgggttggcgttggacccgggcacgtggcggccgaggctggctcccggccgccggaacggcgccgccgtccgccaccggccgacgtccatctcttgcttctgccctcccgacgccgtctcaggcgacgtcctcgccggcgccaccaatagcttcctcgagtttgttgttgtcgtcgtcgccgccgctgacgacgagttcacaagaagcatcgcagctagcaggagagccaagcactgtaacgatcggaatccggccatcctgtggctgctggttcactcgctcagctatacagggaacagtgagagatgttcacggtacgctaggtggctgtgagaaatggaagcaggggaagtctctgcttctcctggtggtggttaaaggagggaaagacgcacttgtctcgatgagatttggatcggagcttaagaggcaggtgatggtggtttgtgaccttaattgtcctgatggtggttatttctagtgtcaactggatgaaaaaacttagtatttgatggagagactgtcatatgcaagctcacatgtggttaaactggatccatgtgcaaccgccacacctagctagctaaggctgtgtttttatctaaagtttggatacaaacttgaatcattttccatcacatcaacctatcatacacacacaacttttcagtcacattatctctaatttcaaccaaaatctaaactttacgttgaactaaacacagcctaactgaagtagatcaggtcggaatctgaaggaagagtgaaaaaaaaagaagtgaactggccttgttaaaaagcagttgtaccctatagtagtactccctccgtcctaaaaaaagacaaaccttggtttctgtgtccaacgtttgaccatccgtcttatttgaaaaaattatgaaaaaaattaaaaagacaagtcacgcataaaatattaatcatgttttatcatctaacaacaatgaaaatacaaattataaaaaaaattcatataagatggacagttaaagttgaacacgaaaacccagagtttgcttcttttttttttttttggacggagggagtagtatacactgtccgaaattgcagtgtatactgacttgcagagaacattcagatcaaactgtctgaaattccttctgctgatgttacacgtgtcgatagcaccttctgctaactctcagctctttattgttccagaagaaacgatctgacagttactgcctgctaacatggtgagcaatctgtaatctacagaatgtcaaagctaacctcctatagtttcactccagttgcgctgaacatgtcaagtggtggtctgctttttctttgtcagtagggaggggaggggaggaattcaggaatatgtggatcatgcatgtggatcatctttgaccaggattaagaccagacatacatgttattgcacagacgtactcttatatatgcactcagtgatccagatttatgcaaggctgtacctggcaaaaccaaaattgccacttgattaatgcagtaatcaacccggagggagggagggtcacgcgagcacgtgatgggaacacatggcccgggaaggggaactgcaagccgcggcgccggtggtggcgaagacggtgagacaccaccggccgcctcgggattgccgcgtgcatcttgaccgccaccgtgggccgccgcttctgtgccttaaaattccttccctttctgcctcctgctgctttgctttcccatgcgttttgtttcttgcttgcatcggtaccatatttatttatagcacacactgccagtaccacggtagcacatgcatgtttgatctcaggtagcatgtgaaagtgctgaacccttaattctggtggtaaatagcaatgtgatttttttaaaaaaaaaacaaaatggcaatgtgatgatgggcattcaagccttcaaggcctctactggcaccaatttggccaaaattgttgtttcagtggaagtttgagctttgaaagtaatttaatctggtagaaatttaaaatggtggcatggaaaaacaaggattaattaagtcaaacgaacttgcggaaaataagatttatacagtttgtatgccgtggaaaattgacgcttttgtaggcacacccaatcgaggcgaattgacgcttctgtgggcacacacctaacataagcataagcagaagttacagaggtatgtacttaatttgatctgtttgtacttttcttctcatttctttctagcgactgggtgaatcatgtgatgccagtgagtatcgcatctttctttagctgggcaacatactgtggcgaaacttcggttacgtacgtacgtagtatcaattaccttaccactaccaattgtaaagagattaagtgccagctaatctgtctttttctatctaggatcgccccaagattcatccacaactaccccacctgcaaatggtaatttaggatttgttacgacggccatgtggtcgaaacacgtgatcgtgtccggcccgatccggtgtcggagccccgagaagaaaccgaccacgggtggtaaaaccatctttggtcggtcgaccaaattccacaatagtttcggtttcattaaaaaccgagattaaaatcgacttttagtcctggttaaaaaaaattgatctttagtcccggttcaacccatgttagaggttataatccctgttccttatccttattctctcctccacaatcacaaccactccctcacccacagatcaatcctcctctcttctccccccctcccctcttctatcctacacagatcctccccttcctccttccttcccccttcccttcctcctccctcccatggagacggatgaggccactcctccttccttccccttcccttcctcctccctcccctaggaacggatgaggccgcttccccttcccttcctcctccctcccctgggaacggatgaggccgcgctacgcggacgcggtggatggacggatgcacatgcgtgctgcccagacggccatctcttttttttcttgatattttttgattcactgagatgtaattttgtgattcattgtatggatttgagatgtataatctgtgatgtatttgattttagtttaaatttttaggatttgtgatgttttagatttgtgtgtaaaagtaactttaagatttgtgatgtggatttgagatgttactttatttgggaatttagggtttgatttgggatgccatccgattcgggagaaaataaaaaagtaacaaaaaagaaaagggcaccatccggattgtccctatctacaaaccgggactaaagatagatctttacttccagttatttcgcaccaaccgagactaaagatagatctttacttcagttattttgcccgcgatctttagttccggattcatacactggtggagaaaccatctttggtcggtcggccaaaatacacaatagtcccggttgcaataaaaaccgagactaaagatacctttagtcccggttcaaaaggatagagttcttttttatctttagtcccggttggtaatagatctttagtcccggttagtgttaccaaccgggactaaagataatagatctttagtcccggttagtgttaccaaccgggactaaagatagatctttagtccctgttggtaacaccaaccggaataaaagatcggcatgcgcaacatgggcagcgaagagtacgagaccagatcgaggaggaggaggagcagttaatatattctatctcctccctggccttatctcttcctcctccatatctcttcctcttcttcctcctctccttttaacttctctcctccttttcctctttctcctctaccagcgccggcgggcggagggcctggcggccagcgggcggagggcctggcggccggcggcgcggaggcccgggcggcgtcgcgggcgggaagggggggtggcccgggcggcctcgcgggcagcgcggtggccgggcggtgctgcggcccgggtggcgcggtggttgggggcggcgcggcgttgggcggtgcggtggcgggcggtgcggcgaagggccaggcggcctcgcggcgggcggcgctccggcggccggcggctggcggccggcgcggcagtggcaacgggctttttttttcttctttttagaatttgtgattcggatctgtgtatttgatttgtgtgtgatgtgaatatgatgtatctatgatgaattttgtaaaatttgtgatgtatctgtgatgtatcgatttggggagttgaggatttggggataatttatttgggattttgggaaggggatggggtgaaatcaatataatgaagaaaagaaaataataatggagcaaccggatctagctagtctagctctatctttagtcccggttggtgttaccaaccggaactaaaaaggctatatctttagtcccggttggtaacaccaaccgggactaaaaatggatttttactcccggttttttcacccgggactaaagatagtgatctttagtcccggattggtagtcccggtttgaaaaccgggactgtaggggggttacgaaccgggagtaaagcccctttctccactagtgatagtcccggttagtaaaccgggactataggaggttacaaaccgggagtaaagacagtttctccaccagtggacctgctcctccaggactatagggggttacaaatttcggccgcactttggtcagagtatgagcgtcgtactacggcagcaagttgcatggacaaaacacaccaccacccgcacacattgagcagttagtttgcgtggccgtattttctcttttggatctattatttgtgttttcacccctcaacttctctattgcacaaccaggctcttgaattatggtctatttttgggactatctaaaaatcattcgacatattttttttcttagaaaatcagtcggattttcaagccacccaaaagctacatgcggttcaaatgaaagcgtatcaacgtaagtcagtcatacagtcaccggacgttaatcacgtcaatgatgctaaaaaaaaaaagaaaactaacagcttattggcgcagtaaaaatatcgaatcacacctcaaacaattagggttcaccatagtacaataaaacaacgatgagtactacatgtgaaataaaaattacacccacatctactgaaaataacattgtgacgatagtgtgcttacgttgtaatcgtggtgtagttattgtataactgctaacagtgtggaagtggggtgtaactgcggggtaagggtgtaaaggatgtaattgtggtttgaattgttaaaaaaatataattttagcagcaaagtcatcattgcctacatgctcggttggtaaggttgcatgttgtggcatcctgacagtcacgggatcgactctctgctatggccaaatattttttttcctccaaggtgtctacacaaatttcaatgtaaatcgtgcgatcaacaaattgactaatttttaacttctttcctcaaaggtgtctgcacaaatctcaatgtaaatcgtgcggtcaacaaatcaactaatttttaaccaaaaatctagcgaaagatatatagcaatttcactatatttttccaagcaaatctgcatctttagcatcaacaggaaaatatatatggagtacagtttttatccactccggatgggtgtggcaaaagatttgccactttatgagagggactgttgtgagagagatttaaccaatgtggtgaaaagcggtgaaaagttaaattccccagaaacttcatagaaacataattcaggaatgagtaatgaggccatgaacaaaggagacgctaatggtgggagagactccaagaggagagcatcaatgatggtgaagaaaaaaaattgagaaaaacaaacggtgggtgaattgaacataatcttttagccctgaattagcccccaacaatccaaacaagtgggctaatttggggctaaagtgaagtagcctccctcaaaacattagcccctctcaggggtgctaatgggctaattttctatggataccatcaaaaagcagccctgtctcctctctctctctcctctctctctctctccaccgtttagccctgaattagcccatggatccaaacatgtcaccctaggctaatgtttagcctaccaattcaagactaaacattagctcttaaaattagccatgggctaatcttccaaacagggccttagtatcttagatgtgttaatgggcaagttcgcctgactacccaacttttgtctagcctaattttaccaggtgtcttaggcataacatgccatccacggattcaccggacaaaacgaatgtgaatatccccaagaaccataaacacataacaagtgatcttaaccatatacaaaacaagaattttgaaatgcatacaaaatgagtactattggttgaatacaaaatatgtatcctctatttcaaatctgtgaacaaaatgtagagttaaaaaaatggaaattgctatgcatacaatccaactgtccgactcacgtactactgaatttgatcgacggttgtaaacggcagcgcaatgcatatgaacatgttcttctttaattgatctatggttgtatgtctactggtatttgatactgtcacatataaatctgcaagtgcacggataccgctgtagcacttcaccttagagtattccaagtgtatgaatcacaggaaacgtgtgtatctaagaatggaattctatacaaggacaacaactaatgatagcataggctagagaggactcctatggattcaactagctaatttaggttaatgaatgctttaggtatcggccttcccctggtttgtcaggctgagttcaaccttgagctctctgatgtacccgaacgtgaaaggatacaaaggatggacagtgacggagcgtggggctcctcaccgggagaccgcgcgggcccccctttgccggttcggccgggggcgctaagtgaggttctaagcccttgatctgtggaatggttcgcgagagagcaaacgcataagacacgggcgaagtagacaggttcaggccgctgagaagcgtaataccctactcctgtgttctggcggatctgtctctgaaggagttacaaagagctggagtgcaagagcctttgaactctagagaccctctccctactctttgtccccgtcctttctacgagctcccctctctccttcttttttttctccgttcttttcttggtaggcatggtcctccttttatatctcaaggggataccacatataccatttctacctacccttcttttgggtggggacccatcctactttgagcaggatttggctcgtacttttatctgacaccgggatagccctgtcctccctcattaatgggcggagatttgcaatggctgctgtttgaatgaccctccgatgggatgggtcataccaacctccactccgtcggaagcaggtgcaacgtggaagcacggttgtttgccgatgacatgacaggcgtcaaaccagtcacagaccggtcactctcgtccaccacgcgtcagtttagcaagctgcatgtctgcccttcttcatacaatgacttccttgcaatggttgggatgaagcctggcatatatctgaccgggaccgacgtgccattttcaggagctggcacgccgtctccggctagggacaagtgcctggaggctctcatcaatccgacgggacggggcgaggcgtgtaacaggccacctgccaccacctaacccgcgatctgaccggtctgtgaccggtcacacgctgcgcccggtcacggaccggataagcgagcgcgctgcgctgcattacatgcggcgtgacgcgctcgtccaacccgcaataaatgcggttaggtgagccccgctgtgctcacctaacccatatacgtggcgccaaacccacagggggtcggggcgccccggccctcggggtcgaaacgggagcagtccgacccctcggggagacaaagggaggggcggccacatcaccctcgggcccgacccccccccccccgagggggtcaggccacgtgggtgatcgcggctgcccaagcctctagtcatgatactcccggtcccatgtcaccgacagtggcgccgtgggttctgttgcggcccgggggcctcggttgcctcgcgcgcgagcgctcggcgggcaggggtgacgcgttcgcggtctgaggtcctgtgccctaccctcgccgcactcactcgttttcaagctcctcctccgccggcgtcatggcacggggctccgcaccgctcgacggtagcgtgctgccgccttcccgcatcgtgagcgagaagcaggccgggctgccgcgccgattcatgccggcatctgccgccggccgggaggtggtcgagctgggcgagggacgctcggtaccacactacccggggcggtccgtcttcttcctccctttcgcaatggcggggctggtcccgccattctcttctttcttcatggatgttctggagttttatgacctccagatggcgcaccttacccccaacgcgataatgacgttggccatcttcgcgcacctgtgcgagatgtttatcggggtgcgcccatctcttcggctgtttcggtggttcttcaccgtacagccagtgtcgccgccgtcggtagttggtggctgctacttccagccgcgggggccggcgctgagccgctacattccctgcgtcctccgcaagaagtgggacgactggaagagtgactggttctacaccccctcgccgacgaagcgcgcctccaacttccgagccagcccccagcgcaggtctccagctggcgggcgccggtagatctgggagatggctacgacgccgttcttgaccgcctggcgggtctgcgatcccaggggctcacgggggccatggtgtacggcgactaccttcgtcgccggattgcgccgctccagcggcgcgcccggggcgcctgggagtacaccgggtccgaagactacatgaggacccaccaaggggtcagatgggactgggccccctgaggacttcaagatagtggtccaacgggtgctgaatctcagctccgtggaggcgtccctcatcccccaaggagtcctccccctctgcagcgatccagatcgtgccaacatcctgaccatcatgatggcggtcggggcgtcagaggagcgggctcctcgaggccacgatggcgcgggcgggagccgcaggggagaacaatctaccccaggagggggtcgtgcttctgggccccgtgacaggggcccggggggcagccgccctgccgacgcccgagggaagaggaagcaagagggtaccccctccccatctcctccccgagggggcggggcggcgcgtgtcagcagcaggcgcccggagggggccgcgccgacgccgcagcccgagggggagcggaagaagaaacggctccgcaagatgggggggaccgaatcataccggggaaaccttatctcccccccaaggtggtcgttcaaccgacctcctcgtaggttcgtcccgcgcccactgtagctgtattcattctcccaatgcaagttttcactcacccgttttgtttgtcttctggtttttcttctgcttcagcgagatcccgtcgcgcccctcccgccattccaagtccggccagtctgaggccgaggatacggcgaccgcggaggcccggaggcgggaaactgaccggcgagaagccgcggatcgccttcgggaagccgaggaggctgcccaagaggccgtccgggctcgccgggctgaggaagccgctcgggaggaggccagactccgccgggccgaggagtccgcccgggaggcggaggcggcgcgcgcacgccaggcggcctgccaagcccccgacccgactccgcccgaggcgacgacgacttccgaggccacccacgacgaggccgcgggcgcaccgctcgggcccgacccctcgggcgacgctcaggacaagccaggtccgggggacgtccctgagtccggtacatcgatcggcgggccgagccgtgcggcatcctcaccgaggcggctctcccccatgccttccgctgccccactgagcgcagagccccttctgcaggccttggccgccgcgaacaccacggtgttggacgggttaagtgcccagatggaggtcctgcaggcagagcaggcggagctcgacgctgcatgggcgcgtgtcgaagaggggcaacgctcggtggaggccatggtggaggctggccgcaaggcacaccgccggcacacctcggagctcgaggcccgtcggaaggagctggcggagatcgctagggaggtggaggaggagcgggaggctgccctcatcgccaccgcagtgatgaacgaggcgcaggacgaccttcgccttcaatacgggagctgggcggcggagctaggaaagaagctcgacgccgcccggggggtccttgacgccgctgctgcccgggaacggcgggcggcggagaccgaggcggcgtcccggcggcgcgaagaagcccttgaggcccgtgtcacggcgctggaagagcgcgcctgcgtgaaggagagggacctggcggaccgcgaggccgccgttgccatccgggaggctacactggcggcgcacgaagccgcctgtgctgaagaggagtgcgcactccgcctccgcgaggatgcgctcaccgagcgggagcgagctctcgaggaggccgaggccgcggcgcaaaggctggcggacagcctgtcccttcgtgaggcagcgcaggagaaacaaacgcgtcgcaatctggaaggtgcccgcgccgagagggccgcactggatcagcgggctgctgagctcgaggcacgggcaagggagctggatgcgagggcgcgttgcggcggggcggccacgggcgacggcgatctagccgcccgcctcgcagctgccgaacacaccatcgccgagctgcagggcgcgctggactcgtccgccggggaggtcgaggccctccgcttggcaggcgaggtagggcccggcatgcttcgggacgccgtctcccgtctagaccgcgccgggcggcaggtgggcctctggggcgggcggatcgcaaaatatgccgccaaccaggggggcctcgcccagcgcctctcagagatggccgggactctccagcggctccccgaggagctcgaggagacgatcaagtcatcctcgagagacctcgcccggggggcagtggagcttgtactggcaagctaccaggccagggacccggacttctccccgtgggcggcgctggacgagctccctcccggaaccgaggacgacgcgcgcgcgcaggtccgggacgccgccgaccacatcgtccacagcttcgagggtacggcccctcggctcgcgttcgccctcgactccgacgtggagggcggcgacggtggtgtggatgacagcgacgacgaggccggcgacccgggagcctcgaagtgagcccccaggcccccgccaatcttaaatagtatttcctttcttcttccgaggccttcgggcccccttcttgtacaaactaatttaatctgcaatcaaataaagaggaaatttttgtgtcagctctgtttgttgtgtgtatgagacgaggatggtctgtgccgtggtccttctgtgtcttggtttgaacgagggctcgtgcccaggtcccagcctcaaatggcgcgggtcggggctagtgcttggggagatccacgtgtcgagactggccaggccgggaacgtggtgaccgagggttatggatgacccgattgtgggcctttgccgattcccccccggagttcaccacgccccggggcacggctcggttctgggccccgtttggcgatttccgccggcccgggccaccgagggcagggtcgagcacgagcatgctaattcaagccaagactctttgaaaggaaacaatggcacagacacagtccttaggaaatcgaaaatgcttttattgaaatacggaagagaaaaaaaataagtatatgcatgtggtagcccccggccaaccctgcacgcccagggggggtgcggggttggcccgagcccgagacctgacacccgacccctactaggggtagaaacgacgaaggtgttcgatgttccacgggttaggcagctctgtgccgtcgcccgtggccagccgaacggagcccggccgggggacgccgatcattcgatacggaccctcccacattggtgagagcttgctcagtccagcacgcgtttggacgcggcgtaggacgaggtcgtcgacgcagagtgatcgggcccagacgtggcgctgatggtagtgccgcaggctctgctggtagcgcgcggctcggagggctgcgcgccgccttcactcttccaagtagtcgaggtcatctctgcgaagctgatcttgatcagcctcgcagtacatggtggcccgaggggacctcagggtgagctcggatgggagaaccgcctccgcgccgtagacgaggaagaaaggcgtttccccggttgctcggcttggcgtggttcggttcgcccagagcaccgctggcaactcctcgatccacgagtcgccgtgcttcttgaggatgttgaaggtcttggttttgaggcccttgaggatttccgcgttggcgcgctccacttggccattgcttctggggtgggcgggggaggcgaagcagagcttgatgcccatgtcttcgcagtagtcaccgaagagttcactagtgaattgtgtgccgttatccgtaataatacggttaggcaccccaaaccgggctgtgatgcccttgatgaatttaagtgcggagtgcttatcgatcttaatgaccggataagcctcgggccacttagtgaacttgtcgacagcgacatatagatactcgaaccagcccggggcccgtctaaacagacccaggatatcgagcccccagacagcaaacggccatgaaagaggtattgtctgtagggcctaggccggctgatgggtttgcttggcgtggaactggcacgccctgcaccgccggaccaggtcgaccgcatcgttgagagccgtcggccaatagaaaccctggcgaaaggccttgccaaccaaggtgcgtgaggcagagtgggctccgcactcgccttcatggatatcggcaagaagctcgacgccttgttcccgaggaatgcacttcaggaggactccgttagccgcgcgccgatagagggtcccttccaccagtacgtagcgcttggagatgcgctggacgcgttcactcccttcgcggtcctcgggtagagtcttatctgcgaggtacgcctggatctcagcgatccaagcaatcaatctaagggagctgggagcgctctcctcgggtctcgaggcctggactccgacgggcctcgggggccgttcaggcgcgtccgtctcccctagggggtcgggtcgcgccgacggctgggcaagcctttcttcaaaggcgcccggtggggtctgggctcgcgaggaggcgagccttgagagttcgtcggcgaccgtgttatcccgtctgggcacgtgccgaagctctatcccgtcaaaatggcgctccatacgccgcacatggcgcacgtaagcatccatctgcgggtcagagcactggtactccttggagacctggttaacgaccaactgagagtcgcctaacaccaggaggcggcggatccccagtccagccgccactctgagtcccgcaaggagtccctcgtactctgccatattgttggttgcccgaaagtcgaggcggaccaggtatttgaggacatctccgctcggcgaggtcaacgtgacccccgcaccggcgccctgaagagacagggagccgtcgaactgcatcacccaataggcggtgtgaggcagctgcgaggggcccgagctggcctcggggacggagatgggctcaggggccggggtccactctgccacaaagtcggcgagggcctggctcttgactgcgtggcgtggttcaaagcgcaaatcgaactcagagagttcgattgcccatttcaccacccgtccagtaccctatcggttatgcaagatttggccgagggggtaagacgtaaccaccgtgacccgatgcgcctgaaaataatggcgcaacttcctcgaagccatcagaatagcgtaaagcatcttctgggcctgagggtatcgggtcttagcgtcccggagggcctcgctaacgaagtagacgggccgctgcacctttcggcggggccgatcttcttcactaggggccgcatctccagggcgctcttcgtccgagaggcctcgcggggcgcactcggcttctgtgccgacgacctcggggtcggagggcgacaggcgcggccttcctgcagtggccccggggccatcctggaggtcgggggcgcctggcaccgtcggacaagcgggcggagggccagctccggccgtcgggggccttgggccaccgttcggctcgggggcctctcctccctgctctctcccgggtcgagtcgacacaaggtggggatgcgcggagcgagggtcgtcctcgtcatgctccgagaggccgcgcggggcgcactcggcttctgtgccgacgacctcggggtcagaaggcgacaggcgcggccttcccgcagtggccccgtggccatcctgggggtcgggggcgcctggcaccttcggacaagcgggcggagggccagctccggccgtcgggggccttgggccaccgttcggctcgggggcctctcctccctgctctctcccgggtcgagttgacacggggtggggatgcgcggagcgagggtcatcctcgtcgcactccacgaccaacgccgcgctgaccacctgcggggttgccgccaggtaaagtagcaacggcttatctggctccggggcgaccaggactgggggagaactgaggtacgccttcaactgagtgaggtcccgttcagcctcctccgtccagataaacggcccggagcgtttgaggagcttaaataggggtagcgccttctctcccagcctcgatatgaatcgacttagggcggccatacagccagtgacacattgcacatccctaagcttgctgggtgggcgcatccgctctatagctcgtaccttctcggggttggcctcaatgcctcgggcagagaccaagaacccgagaagcatgcccgcaggcacgccgaacacgcacttgtcggggttcagctttatgcgggcggtgcggagactttcgaaagttttcgcttttcgctagatccgagagtaaggtctcttggttgcgtgttttcacaaccaagtcatcaacataggcctcaacattacgtactatttggctacccaaagaaattcgagtagtacgttgaaaagtaggacctgcattctttaacccgaaaggcattgtcgtataacaataagttcctatgggggtaatgaatgcagttttttcctcatcctccctagccatgcgaatctgatgataaccagagtatgcatctagaaaacacaaaaggtcgcaccccgcggtggagtcgacaatctgatctatgcgtggtagggggtaagggtccttaggacatgccttgttaaggtcggtgtagtcgatgcacatccgaagcttgccgttcgccttgggaacgacgaccgggttcgccaaccactccggatggataagctctcggatgaatccggcctccagaagtcgcgccacctcctcgcggatgaaggcttgacgttccggggcctgccgccgcactttctgacggaccggccttgcgcccggccgtacggcgagacggtgctcaatcacctccctggggaccccgggcatgtccgccggtctccatgcgaagacgtcagcgtttgcccgcaggaaggagacgagcgcgtcttcctatttgccgtccagcagaccaccgattcgtgtggtcttggacgggccgtcgcccagggcaacctccttgaccgggacctcgtcgcacgtgatcatccgctgccttggggcggcggggacggaggtgccgagcctctcgtcgccaccctcgggcttggacgcggcggcgaggtggtccgcgcgctgctccatacaagcaagcgcgactttgaggtcgccatggacagagatggggccaccggggcccggcatcttcatctggaggtaggcgtagtggaccgccgccatgaacttcaccaacgcgggcctccccaggaccgcgttgtagggcagactgaggtccgccacatcgaagttcacccgctccgtgcggaagttggcggatccaccgaaggtgaccgggaggtcgatatgacctagcggccaagtgtgccccggcgtcacaccgataatcggctgggacggccggagcaccatccccggggccttgatggcgtcaaaggctgtgggggaaaggatgttgagggctgctcccccgtctatgaggacacgccccaacttcacgttgcaaacggtgggggaaaccaccatcgcgatctgtcctccccgggcaatgcacggcgggtggtcggtctggtcgaaggtgagggcaacctccgaccaccgcgcccgccgcatcgcctcatgggtaggggccgcggccagaagctctcgcttcatggccttgaggctccggcgagaaacgtgagcgcatgctcccccatcgacggtggcgatggtggccccaggctcctggaaccctaggtcatcgtcaccatcgtcaatgtcctcggcgggggccttctgcttggcctcacttcgccggttgccagagggagccgctggggccttgccctcacggcgctcctgcctcctctcctcctcccacttcctcgtccgctcagccaaacttttgaccgcgcggcagtccgcgaggtcgtggagggaggtgttgtgcacggtgcaccacttgccggtcgggtgctccctgctgggagcgccggcctccttctttttgtcgctcgcaggcctcccctttcgggtggcccgcgaagcgccctcgacggcgaggacgtgaccctcgtcgtcggaatgggccgacctcttctttctcctcctgtcccgccgccctgaccgagcggcggatccgggggcggctgaagctgccacaccggaaccggtggagttccaggtccatgcctcctcctcgcgagccacacggtccgcgagctgaaaaagctccgcagtggtctggggctccttggaggcgatcttctcgagcatgcggttgtgccgaacgccccccctgaacgcgtagatcaccgcgtgtgcagggatacatggtatggtgttgcggacttgacaaaaccgctgaatgtacgagcgaagagactcatcgtcccctcgctgtaccgcgtgcaagtccgcttcttcacctgggcgcggatatgtgccctggaagttcatggtgaactgctggcacaaatcctcccaagagtggaccgacgcgggtggcaagtttattagccaaccccacgcctgtcctctcaggaccatggggaagaaattcgccatgaccctgtcgtcacccccggcggcctcgatcccagtcgtgtagatctggagaaactcggcggggttgacgcttccgtcgtatttttcggtgatggtgggccggaaccttgggggccaacggacgttccgaaggctcgccacaaaggctcgacagccggcaccgccaaccggggacacggggggttggcctccgtgcccggaccgaagtggcgctccggacgaggaagtgccctccgatgcgtgggcagcacggcgatcattgcgccggcgctcgatattgaggcgggcatccggcccctcacgcacatcttcttgggtcagaggcattgacgagggaatggcagacgaacggcgggcaacggccgccgctcgccgcgccctccgcctcgacgacacggagccggcagtagcagcgccagcggccttggtggcggaggaccgcccgccggtgcctaaacgctgctgcgccgtcatgaccaagttggccacgtcatctagccaacgtcgagttggagtctctggatcagggacgacgggcgggtgacgcaggagcgcgcccgcagcctggagcgcgccctggggcgtgctgccatcaccgtagacgaggagacgacgctccccgtctcgccgtccttctccatcgctcgtgggcggcgaagtcacggatctttcgaccccctcgagcgcctcctcccgcctaagacttcggcgagaggggggcggcggagtacgagctcgacgacgcgggttctgctcgctgtcgtcaccgctagcgctcggagagaggttgtgcgcttttgctcgttcggccattgggctgaacgggaaaagcttggcgcacacgaaagaggatgagagcttagaaaaacaaacgcgcccccacctggcgcgccagatgacggagcgtggggctcctcaccgggagaccgcgcgggcccccctttgccggttcggccgggggcgctaagtgaggttctaagcccttgatctgtggaatggttcgcgagagagcaaacgcacaagacacgggcgatgtagacaggttcgggccgctgagaagcgtaataccctactcctgtgttctggcggatctgtctctgaaggagttacaaagagctggagagcaagagcctttgaactctagagaccctctccctactctttttccccgtcctttctacgagctcccctctctccttcttttttttctccgttcttttcttggtaggcatggtcctccttttatatctcaaggggataacacatataccatttctacctacccttcttttgggtggggacccatcctactttgagcaggatttggctcgtacttttatctgacaccgggatagccctgtcctccctcattaatgggcggagatttgcaatggctgctgtttgaatgaccctccgatgggatgggtcataccaacctccactccgtcggaagcaggtgcaacgtggaagcacggttgtttgccgatgacatgacaggcgttagaccagtcacagaccggtcactctcgtccaccacgcgtcagtttagcaagctgcatgtctgcccttcttcatacaatgacttccttgcaatggttgggatgaagcctggcatatatctgaccgggaccgacgtgccatcttcaggagctggcacgccgtctctagctagggacaagtgcctggaggctctcatcaatccgacgggacggggcgaggcgtgtaacaggccacctgccaccacctaacccgcgatctgaccggtctgtgaccggtcacacgctgcacccggtcacggaccggataagcgagcgcgctgcgctgcattacatgcggcgtgacgcgctcgtccaacccgcaataaatgcggttaggtgagccccgctgtgctcacctaacccatatacgtggcgccaaacccacagggggtcggggcgccccggccctcggggtcaaaacgggagcagtccgacccctcggggagacaaagggaggggcggccacatcaccctcgggcccgacccccctcccccccccccccccccgaggaggtcaggccacgtgggtgatcgcggctgcccaagcctctagtcatgatactcccggtcccatgtcaccgacagacagggttgtcaccacctgccgcctagcttaatttacatggagcacacatcaaacgaaggtaaccgctaacctaaacaccatgtctaagctattgattaatactctagcctcacacatgaacatccttctttatccagagtcctagtactaaagcacttaattataaactaagagacaaacctgcactgatgagaatatatctcacttaagtaaactaattaaattgcataaagaaatcttgaatacttactttgtaaaagaaacattcgcggaggtacaaacaagaagaatgcctacgactctggcgctcctcagaactctaatgaaagaatgccgataaacacatgactcctccggaaattctcggagagaacttcgataattaggggcaccacttccggagctttccctcactttcttactaatccaacataataaagtaaagactaaaagtgagttgtactatatactttgtcgagttgtgtgttgagaatgaaatggactcctccttttactatatacttgcaagtatggcagttgtaaggtggtttccgatgtcgttcacccacaaccatcatcaacatccaagtttgcaagtgccacatgcaaggagggtgctagggctgccaagtttggttcggccgaaccagggcagcctcccctggccaccaaccttctccagtgcatgataggtgggcccctacggctgttgagggtggtttggtcctcactttaagtcggtttcgactgacatgtgcaccctccaatccttgtacttgcgtatgattggtccatgtttgttgcctggtgggtttgtttttctcccagaaatcacctgcatacatatatttaccaaaactggtggaaacggttagtaataaaccctcagcactaagtttgatattattttttgaaacttttatgcaggagttcatggttaaagtacgcgcttatcgaccatcaacaatatctccagttgtacatgagttttacaactagttcgtactatagcagtagttaaaacaaaaaaaatgatccaccagacaaaacaatcatcccaggaaccatgcacacaaaacaagtgattgttaaccgtatataaaacaagatttttgaaatgcttaaaaatttgagtgatattaattgaatacaaaactatcctctatttggacacaaaactagtatcatatctttggacaagagaggggagaagggagaggaaggaagaagaaagtgctagtcgctgacatgtgggacccacgtgggtcccacgctgactcagtttgccacgtcagcaaaaactgggtacaatattatctaggacctcgggacccgaccatcatcccgctgggcttgtatcgctcatgagcacaccagtatgattcattccatgaaccctaagtctcgttcatctgtactttttgcatctactgtggttggaagagacttgaatagtccttaggtatggaattcttcaaggaaagaaaaaatcaaaatatttgcttgcttccaatgacaagatgaaatattttttttgtttgtggtcagttttgcaacgcaattgatttctctgtttcttgaaaatggcagtgtttcttcactttcagcttggccatgtatttttctttctagagaattacatgctttactttctcgttaattccagtggttcctcttctatgcaatttccttctgaaatgctgatacattgtagatacatgtaggaacatgcatgtcatcattcagcttgtgtgtacactgaagtgtgattttaatattcctactgatgatttgtgtacactgaagttgctgtaaattacatcaatttcttgcatgtactagcttagttatgcagattctggcaaactagttaatcaattacagtatcaaattaacagctccaaaatttggcctacaaattttggataatcacctgatggcaaacaaatgtatcatcatcaatattttagcttgtcaatttgatcctggaaggttgcatattgtttgaactcaatctgatgccctggatattttaaaatttaattgctaggtttggatctcttccattagtatttgtggatctcaagctacgagattatctccaatattgggtttctctgaatttttttcctgctcgactagcaattgcaactaaggaagtgcggacacccaagacattttttggccttggcgccaacaatggtgaagatattgagatgggtggtggtgacagtgactctgaacatgttgatctcacatatgagcatgtgaatccagtaattcaagctttaacaaggaagttcagatccaaggcatggaaagaatttgtaccgataatcattgataatgaagttggcgcaggaaaatgtaagcattgtgacatagagatccgtgcaaagcatggagtaggaacaagttaattgaggaagcatttaacaagatgcaagaagcgaattagtgctcttaagatcttggggaatcttgacactacacttatatctcctagtagtgtaaggttaaagagttggagttttgatcccaaagtttctagaagagagttcatgcgaatgattgtatgacatgagttgccctttcagtttgtcgagtatgatggattcataagttttgctgctagtattaatctctacttcaagatgatttcgagaacaattataaggaatgattgcatcactgcttttaaagagcaaaagttagcactgaaagagatgtttaaaggtgcaacttgtaggttctcattgactgcagatatgtggacttcgaatcaaacaatgggatgcatgtgtgcgacatgtcatttcattgacacggattggaaggtacgtaagaggattataaagttctttggagtaaagacaccacatactggagtgcagatgttcaacactatgcttagctacattcaagattggaatatcacagataagatattcagtcactctggataatgcttcagccaatcattcaatggctaagttgttaaagtgtaatttgaaagttaagaaaactatatccgcaggagcgaagctacttcacaaccgatgtgcagcacatgtcatcaatctcattgctaaatatgggcagaaggctattggttctattgtttgcaacgtccgtgaaagtgtagtacatggatggttgcaaatctcacaaagaaaaatttaaggagatcattggataggaagggatcatatgcgagcttcatcccactgtggatgtatgtactcattacaactccacatatctaatgctcaatgtggccttccctttcatgagggcttatcatttattggttgttcaagacataaattagaaatatgcaccctatcctgatcggtgggaaagagcaaccatactctatggaattttgaaggtgctttatatgcaactatggtggtgtcaggatcttcatatccaacatcaaacccgtattttcatgatatgtgaaaaatcaaattggtcttggacaagaaacgctctaacaatgacattgaagtggcaagtatggctaaaaagatgaagaataaatttgacaaatattggtaagtcttgcaaatatatgtgcattcctgtcattttttacccaagattcaaattcaagtttgtggaatttcggcttgggcaagcctttggtgaaaatgctaaagaaaggattgacaaagttaggaagatattgaacatgttgtttaaggagtactctgataaactcaaggataaccatgctaactcactgcgccaagctgaacatgttatggctatctctgaaaatgatcctatagctgattgggtttagcacatcaatgaacaattaagtgggcaagttgatattgaattggatatgtaactctaagagaatcctattcaggaatttgggaggaatgccaattgcctaaagtatcagctctcgcttacatagcacgcgacatgttagcatgccctacttccacagttgcatcgcatctgtgtccacattcagcacaggatctagagtgatcagcaacttcatatgttctcacaatggattcagttgaggtgctcatctacctccaagattggtttcgagctgccgcaagtatacgcgtctacctgttcattcacttatattacttatctttctaaaactaatttattttttatgttttgattgctaggtcctaacataaatgtgagctcggtaaatgacatcagtgttgatatttcttaacgacattactagaaatataattctcagcgattgtgccgaaatattgtcggtaaattttacggtcatagatatattccgcaggcgcacggatataccgttgtagcatttcacctagaaatattccaatgtatcgtatttatttaatctcaagagaagatatgataagagagtacaatgttaataatttatattacttgtatagatcaaagtctatgcaggggttaacaatatttaaggggtagaatgagttgacacacataaggaactaatgagagtactctcattaaaatgtaatctagactaagtggggaaagaataagaaaagaatcatttctgtacttctattatatagtgattttagtatacacttgctatatacaatcatgcaaccaataccccctaactatgtcctcttgatgtatcgagagaccacccgtcatgaccatccaaccggtaatgaacactaggaaattgtcttagtactatatgtgcacgtcgaggaataccggaactaagctatcaccatcagcagcccacctctacagacctgtggcatataacaccatttaatgatatctaataatctaagcattacgcttacataactaaatactactccacatcattgcaacagacatagagaaatcatagaaatgaacattaaacccacaccattgcatatctctgataagctagctacatgattatatcgagacaagtgcaaactaaagtcggcacttgaataattatataaatgaaataaaggaccaaaaactatataaagaataatatttcattaatgattaaagtcttacaaaagatggaaaaactactagagccatacccgaaatctcctgaagacttggagaactaaggaaatcattatattcctactccactagtgctagaacaatgtaaataaactatagagctcttggaatgatccttcttggtgccttttggaatggagggagtgaaggctttcaataggctaccaatgatagttatggcggttggaaatgtctaaaatgccccacaatcgtcattggggactgatcaggagcgtccacgtggagggccaagatgaggggccttagcaaagggttcggccgaatgcatagtaccaaatggaaccctaggttcggctgaacctaggctgacccccctagcctgctgcttcctttggaccttctctcatgactacttaatccagtggtatggtggttgggcccttttgcagatgttgaattgagtttataggcccattcaaccataagtctgccacttaatgggcgtcgattgattgttcgattattttccatcgattctccttcatttatgtgaagatctctatatacaaataaagttccaaatacaagtggaaatagattattcttaaacaaatatgcatagcaagcattgctagttctcctttattctggatatattgacgatcgaaattggtctataacgaccgtcaacaatcagctacagtgataatttcgtggtcaataaatttctatgaatcggcatggatggcatcatttagttctatatatttgtctaggatattgttggtttaggcatttagcagtagatgctctgtttcgtaatgcttctgtaattgagtcactaagaatacagatgggagatgcttaacaaagcttctacccaatggtgtgttctatgtatgtctgaaatctggacacggtttgaagagattgggaaagcttattctatatactgccagtccataatatgtgcagagtaaaatttcacctatgggaatatttcttatgaactagatggactgctctgcattttttttttttttttgcatttggtactatgcattcagttcatcttacaacacataatcaattatcatctttaattaacaactaatgcatgtactatcaattagctatctttaatttcctgcatgaacctggacctatcatgtttatttgatctccttcgtgtttactgatgcgcccatatttgatctttctatcatgtttatttacagaacctggacatagaggattaaatggattgtggaagcttatgaatgtccaaatgaaggatctggtcattgatgatttcatggttagtaaatttcttgtgtaatttttcaatctgtcagtttatcagtaaagttgttgcaaattatgccaatttcctgcatgtactatctttagttatgtaaattctggcaaattacataatcaattatcatcttcaattaacagctcatgcatgtactatcaattagctatctttaatttcctacatcaatatgcggacattggacagtcttttagcaatattttactgagaaatattgatcattcaatctctctgtcaagtttttctgcaaaacatggaaaagtcaatggagtgaatggactatgcaagtttggaaatgccctagtgtagatgatattttctagcttccttaatttttagtccgccactttgatcctagaaggttgcattttgtttgaactcaatctgatgccttggatatttgtgatgtttaacttcatattttgtggatgatatttgatactaaaagactgcatttttggtgctgttgttttgttttgcagaacataaaattctgtaatgatatttgatcctagaaggctctgtttccacacgtcgtcaaccatgcacaggcccacaaccacgcgcaggcccacgtgctccctacccacagctaggcaaccagcccacgaactgggtgggccacaaaccttatggaccagctccacttccactagggacagatgcggaccaaggcaccaaaatagatgggaccacgtatacatagacaatttttctctaaaaatttgacagatgtaattataagtacaatcataacgtaattacactgtaacttgtatgtaattacactataacttacatgtaactatagtgtaacttgtatgtaagtttcacgtaattttgaatctttagatctattatgagatttgttctggtgaggaagaaaaaatcacatcacacacatatgtgaaaggatttgttcccacgatctctattttaccgaaataacatgttacggagagatttttgaaagttgcatacaagttacattatagttacagtgtaattacatgcaagttacagtgtgtaattacatctatcattttttgggataaaatttgtcgataaatatatagcaaaattgaaatgtatagggtcaaagtgtgtaggggacgggctggctggatccgctccctttgcaggctgacctcgggtgatccgattttataaattgaaggacccgtaatatatggtattttggtttagtaatgaatttcagactcgatgataaattgagggacctaaagtgaacttactccagtttcaaaatcatccataaaccggaataccagatataacgcatccctaatcttataaacccatgtcacattaggttccaaggtgtattgctcccagttttagctacgtggtgctggcgtggcaaaaaagcaaaattttaaaaagaaaataaaatccatgtgggacccacatgttagtgaagcttctgccggtttggttcagcggatgaactcatacctacgtgttggcctcctgtcctaggctggcacgatgatatgccccaacccccgtcatatgatgataagcacatcccagctacacttgacgtaaacaagggtgatgtaaataagggtgatggtttacgtcataagtcacatgtggaaatgaagatgacgtaaatcatgttgatggattatgtctcaacaagaacgatcaagcatatcatggtccaattacacgcagccgtgctaggaaaatacaacaagaggtgaactcgctctttgcttaacttaatccaaatttttgtgagaattttatactacctaaatgctctacatttgtattgctcaagtttacacccgaggacatcatcaccacgccaagaaggatgggttacgttgaggacaataagggttacatcgaggaggaaccagtccatgccaaacctgtagttgtctacgtcaaaagatggtttacgctgcaaaaggctcaacttcaaaggcttgtgcgacccaaccagtcaactttctccatgctcaatatatatggttggaaggataatcaagtctagtttcacctccaacaaaacggctcatcatttcgacttcccactaaggagttatggacaaatcattgaagactactcagaagccaaacagacgcgcgagtcttctcgggaattcacttattatgacctttgagctagcctatgtccagtaaactcccaagacttttcattctcatctaggagggttgttcctggtataaactagatgataccccgcacgttgctgcgggactatgtctaaatatttgtgatataggtatctacaactataaacaaaaaagcacatggaacaacaattgaagaatgaaccaagaagtgatttcaggttttttttttttcataaacatgctattcaccgatctattccaaaaattgtttacataagtctcagtacactgacctattaatatccaggacagcagctagtgataacttgatcaaagaaccaataatgtaggctgcagcaagctggaatattatagaggccattgcaaagaaaaagagagaaatagctgcaaactgtaaaactgagggaacataacttttatattgaacaaattattttatttgaacattggacaaatcatatatgtttaattttttttttggcaaaaagaggttatcaatgagagtgtaaccatttgaaacatcgatttaaattatctcatactgcactgctgcacactttttgggtgaacatatcagaagtttcctcgcagagccgttgagtttatactttttatgaataaaaaaaatacaacctttgatgcatggaatcctttaccaaggaaaaggctgatccagagagcatagaaaattcatacattaacatgtcgtgaggtattcaagaacagtgacaatacctagtgaaaggatgatgaaatccagctaatagaagttctgaactggctaataataaaatacatgtaatcctgtatagtgctgaactggctagtaataaaatacctataatcctgtatagtactgttgaagatggttatcagttgcatgcttgctttcttcctttgtgcttgatcaaatcacttgttgccaatacatcattagaaagaaaagaagtgatatattgtgctaaaatatggaaatagagtgaatccttcaaatgtactcaaatcagcaaaaattgagaaaggacaatataactcacattggtggtaaaaaaatgaggtagagagattgaaagaaaggggatctcataaacttcgttgctattagggaaaaaatgtgctttgaaaatccaatgggggatgctgacattgcacggtgtcccaaaaaaatactgaaccttgggggaaaaataaaggttaacatgcggtagctgcagatcaaaatcgatgaaggagcaagagtgagaacaacaatgctatacaatgccagtgcgaattaacacgcttcgacgatgacgcagaacaaattccacggttcttgagaggaggagcaacctgtatagattacaatcgatggagactggagtgaagagtcgagaggagaggatgaccccaaaatccaagctatgatagggaagcactgaatgggtgtggtgtgattaaagcatggctgtcattatggtggccttcagtttccttcatttgcggctggccaactcgcatggaggaaatgagcagttcgaccgtcagggaatgctgcattattttcttctcggtttcagcgggggagtggagcgatcaacaatggagaaccgagaggtcagggagcgcatgcactatgtccattgattgggccagtagtgtttacctggtattggctagacttgattgcaacaggcccacgttcggcctttgatctgggctagcttgctggattgagagactgacacagcgaatccatctaatcaatctcacggcagaactctgatccaacggtgaaaaatatttcagatgacgtggaacaaccacagcacaggaaattagttttaattgcacttagtggggatgactcatatagatatataggatataggatatcccctatgttttatcatttaggagacttttgacaatgaaaatatgaaccccttttgttcagctgtgtgctaacaaattcagagagagatctctacccctttgctcttgtgatttccttgtgagattacaaaagcggcgttcgatgccccccaattggtgctcctggtcccttagaggaattatcttgattgattccaggttgtgttggttggtaaacttagagtgtggttgggcgaaccctcgattcaggttgtgtaatagagacggtgcttggtttcgagtacgattgtcaggttgcactgttatcttggctgcttgcagctagttatcttggtcttcttgaggctagttatctattcgtgatcctacaccgtgaagatcgggacatcacccctaccggggtcgtatcacacgatgccaaggacagcggccgccacctgcaatcggccaccaacgcacgccaacacaatggaagtagatgtagtctgcgcaacaaaggcggtgtaagcatcagccatggtgagtcggagagttatctatccacccgtggtgaagaggaggcggtggaggcactcgagatgacagtgatgcgacgagagcggcgcttgagagagaagtgtagagtttctaggtgacgggagtggggatttggggcggtgtagggggagcgggagagaggagatcagtaggacaggggcacggggtaggggcaggtgcatgacgacgatgacctggagctgacagtgacgcggttgagaagccttagcgacctgagacgaggcgctgcaccgaggggctactgagcgaggaggatttgctcatgtatagctcatcctcgaccttctggttggggacaaggctgaccttggcatggctggagatgagggagtagagggcgaaggtgccaccgtcgtcgtcgttgttggcacagagggtgatatagacgtatgatggtgaagaggaggaagctgtagatgatgagggagatgacgctaagaaggtcgtcagtgtgccgaatgccacctttgttcacgtcgaaggtagtggagtagacatatagtggtgacgtgtcgatgtcactgtagaggacgccgaaccattgtaacacctagccgtagtgtgcagccctacccctcctacgcatgctcatgctcatggaacctcaagtgcactttttcctatcggaaaatggagaagagttaaccagaacatgggcttagtcagaaggattctgcccattaggctccctaacgatttgcaaattttaaaacagactagaaaaaaatacccgtgtgttgcagcgggtgaagaatatttaaatcttattaatgttatatggtttagttaaggcgaaatttcactgtgggaattcacttggatatatatatttttagaaaatcgtgagttacagtccgatcgtctcaaatagcatgcgaatatgttttatagagagattttttatacgactccttctgtatttccaaaagcaaacaacttaaaaaccgaccaaaatgcggatatgtattttaaaaaacaaacaaaattaaaaaccgattcatacacggatgacataccaaagtacttgagcaaaaacatcttcaatttttataatagtagagaagagatattcaaacagaaacaaaacagatgttctcttctctacctggttcttttcggtttattttacaattttgagttacaagtgggaaataggacatgacgcgataagaataatatatccaagtatgctctctctctaggcaagagggcattaggcaatttgacttgtggaaacatggtaagggcaagtgctataagcatctaagcacaataccctagatgccacttaagcttaaatgacgaggtggagagaagtgagaagagagaggatgagccacccctctttgtaaattttaataaagaaagataaaagagtaagattgattggctgagagtggataaaataaatagttatgttgcattgaatctaacatattagaggcaatgtggtctatgatctgtcccctaataaattaattgatgatgtggatgatattagaggtgacaatcacatttcctataaaacatgccctaaaaatgacttcaaatctaccgatgattgcttccgccacgtttatatcattcctctcggagattgattttcaccacatttactccaaaacatttttttgcgcggcatcagcatgaaaatgttggaaggtgaatagtatctttagctgaaaaaaggctacagattgtgacaccctacgatatgaatatgatactgaattttcctttgggttgtacggtcgagcagaccaatctgtattgtattatgatgatgtacaagcagcaagagaggattaccattatcttttgacgatttacaaagcaaccaagagaggattacctcagccaaacaacttattaggcagaaaatgagctcaaatcatctccctctctgcaatttccaggccatcgatctcatcgtcttcgcaagacgccgaagagtgaagaccacccagccaagatcaattcatcatcgcatcatgatggtatcctgcttgacaccgtccgcaccgtcatgctgactcccggtcgctgcttcagcccgcacaccatgccgccgccgccatggacgccaccgtcccggctcctgttcagagacaacctcgccttgatcggcgacacgagccttgtcgccaaccgtgacggggagaacgagcatcgccggcccttgttgttgttgttgtttgacgccgcagcctgcgctttgcctggcgatgacacgagccgtgataccaaacgtgacggcgagaacgtgcagcgccgggtcttggacaccgatgccgccgccgccgccacttgcactttgccaggtggcgacacggtgaatggccttgaagggagaagcttgccatggcttttgagcttggacccaagcgagctcggcggcgacttgaccaggaatttgtgcggagtctgcctggcgatgatcggggaacgagtcttgtagaatcgcttttgcttcttggacggcgacggcgagtcgtacgcggcggaggaggttgaagcgaggaacgccgggttggggaacatcactgtcttcttggcccatggcctgttcctgggggaaacccggtttgcggacaccgacggccgcccgagcggcgaggcgggcttgaactggatgcgggaccgcacgcggccgcgcgacggcggcgtgcttgcctcggcgcgcgcggtgccccgctggctctgcttctccctggcgcggcgggcgcgcagcggagtcgcctcggcgttcactttccttgtcctagttacggggttcggggtcttgggggcctctctgttcttgttggcgccggcgtccacgacggcgacaatgtcgctcgcgaacttgctggcctggacgatctccagcacggtctcgccaagcagcatcgccggcagcgacatccgccgccactgggtggcgccgccgtcactgccgccgaacttgccgttgggggatgtcttacgcgccggtgtggccctcatcctgccgacgtgcacagcatccgagagcgaaagatttagccgcgaatcagatgaattcgcaccggagagccaagaaattacaggggatcagggtcgagcacttgcctgacggtctcctgcttgcagcggaggctggtgcggaggtacccgcgcgtgctccgcgggctgaggctgacgccggagaccaccttggcgccgccggctaccgtgtactgcagctcctgcaggcgcgccatgcacctgtccacctgccaacgaacgaacaaaaaaaaaaatcagctcgacccttcacccccatgggtttccccatccccaccgaatccgtcgctcaccttcttgagggtctccctgacgagggcggggttgagagccgcggcggcagcggccgcggcggccgtctgcctggaccgcctggcgtcggggctcctcgcgaccatggccgacgtgcggagcggaggtggcggcgccggtggaggaggatgcggtggtcaaaacgggagctcgtggcgaacgaaggaaggtttgaaaagcgagcgagcggcgcattggcgactaacggtcggcagcgcaacggctagttctcgggaagtaaacgcccagcccacactcatcaggggggagtgggggaccgacctgtgggtggggtcttcttctcttctacgctacgaaaacagaacggaacgggatagctggaccccaccagtactcgccacgtcagctgccacgcgcgcgcgcgagtagcgaattccgggtgctgtttcgtgggccagcggaaagagcgatacagatcacgacggccagaaaattaaggtgtgggtgataaaagattgtgaggataatttttcgaatttcaaatccatcgtgttaaatttggggtcataaagaatgcatgtgccggcaagaatggtttagaactttgggaaacaagataaacagaaaactgttttttgacaataaggatttttttgacaataaggatagtgattactgggtacttcatttcaaagccaaaaggaggccaaagcaaatccttctggttctgctaacttggaatcataaagagtagaatggaaattcatgctctatcagtaaatttgatctataaaaaaaaacttcagtattcagattaaattaattacaaatcattatataacgaaaatcaaggtgacacccggacatatcatcgtgccctacttgccttagagcaaggtcaatagtacagtccactgccaacttcaattacctccatgtcattttatagatagcaccaaaatcaactagtataattgataggctactatgttgactgcacattatcatttaaacaattaaatattcatgcacatatcaaacatatcggattaagagtgaacgctatccctgtgaccatttgaataagccatcagacaccagaaaattcggaccgttccaacgaagtaagtactgattactgaacaaattctgaaccaagatctaaacaaattctgatttctgaacaaaaggataaaggtgtgttgtggaggaagactggaagagttgtgtaaacaaagcaatggtttactagataagatgaatttcatcaactcctcaacatctggcttcagttgatttctatttgtgcaagactagcaccacgaatgggaagttgatgggccacagccacggctttgatcaacggactctgacgaagacgactaccactgcggcatccgcgatggagagacgggatgttccaccccaattcgctgctgctctggatggccttcatgtgcttcatcttcttgcccccaaggcggcgacgatggcgaggacagacgcctccgccgctcgtccaacgcgcggatttgctcctcgccctcgatctgacatgcttctctggatggatttggcgtgcggagtgggatgaagcggcgagccagcgagatggccggactaccggagtggggagagaaagggaaaacgcacacgggatcaggtagggttggtgcgggcccacaaaagctatttcctatcggccgtgctgactgcttgcgagcgatatgcgcgtgagaaaccgtgctgccgccagcgacaaaattaggtggtgtctgcgtaggacggaccaaactttagtctctcttataggactaaaatttttgtgagccaaacactaccttagtcactcgcttcattctctctccttgattctcttcctttcacgtaggattttgctgatgtataattttttggagcctgctgagtcattatattgtacctactcttagggtatccacaatgtgcatctaaagtgggtagtaagaaataaaatactactactattaggttatatacattgtgagagtagtaactaactaataccaggtaacatgcttactatctagacataagaaataaacaaatgatttctctcaattttctctcatggctagtgattgtggggtccaacttactacccacttttgttctttcactattgtgactacaacaacaactaatacccaccgacacagggcccacccgtattcacaaagtaggtagtaaatatcggtgatgcccttaggtagtcaaagtgtgccgacgtgtcatgtagagcaacgtaggagattcacctccaaaacatcgtctcacgattggacggttcatccgtgtacgagtgagggtgtgcaacgtctatgaacgaaatgagacgatatggggatttttatgactataggtttatatagtcctaggtatgtcttacgtacctacccttttgcatggcaattgtatcctaaatattttcttattttgtttggcacataaaggtccggtagtgtatggctccgttgtgctatgtcactgtatcacttagtggcatcaccaccttctcatgtttatatttgatatttgaccgtcttgcttgcatgtatcattccgccgcacgattcacagctccacaccgattttgtggagaagaattaagagagtagaatatttatggtaggatatgagatgcggcaaagggtaattcccaaaacattaacaatttttttgttaaaaaatgtttgaagggatatctctccctccaaaattctttttagtgttggtaggctataagtgtgtgttatttttccttattcctcgtttgccatgagcatgattcctaaattgcaaaattgtatgttttctcaaaaattttttactgtttcaaataaatgtcattacaattcatctattaataacagtgtcactgaaatttgataaaattagaactgtgccactaccatcacattttctatcttcttcgtcatttggcacataggacccacccttagattcatctttttccttcatcctcccttattcttttttttccatctctcttcaccactatctctctcacaaaaataaaaaatggggacaacatgccgcacgaatcgggaccaaagagctcgaggtccggaggaggaggaggaggtgaagtccctcgtcgacggtgttcgtccccacgtggttttctgcccgactactcctacagcaagcactgcatcctagacggcttgaagggggaagcggacggcatgagggtgaagacctcgagtttcccgacgtcttttgggcatcctgaaggcgacgctgagttcaattgctttgatgagtgagcagagagatgatgcaggtggacatgagagaccgtcgatgagccaaagttggagaagaatcccgaccccagtaagctctacctcgggtccgcgccgcatggatctctgacgaagagggcaccgccgcaaggaattctgttgtttccaccccgctccccgcatgcaccggagtgctgccgtcaccgggttttgctgctgctcccgctcccactccccgcgcacgctagagtgtcgtcatcgttgccgctgctgctgggtcgctgcccgctgtcccgtcctcgagtcgccacctgccacgcctccgtcgccgtcgccgctcgcactgctacccgtcgtcgcaacgcaagaaaatgggaagagagaatgaagaagacataaaagaaaagagatgaatgaaaaatataacgacagtggcacaatttaaattttgtaatatttcaatggcatgattactaatagaggaatcgtaattacatttatctgagatagtatatttgccgtatggattgaattaactctcggaattctcatagctgtcaccaggctggtcagtggtcagcaactcaggaaaacaaatccctgctccctaccccacgatttccactgaacggaccagattgagcatcgtcttccatccgttcgcttcgcagcgtggcctgcgggtgtctggaccccacatgtcatcagaacatattgcaaaacccttctctgtcttccccaaatcccccatccccaccgccattctcgacggtttctcgagctccacctcctcgcgtgcccacgccatccatggcttcttccgcacacaatgtgaccacctagcagcgccatcgccatgcctccacgctgtaggcgcctccccctcctcttcatcctcctccttgccgtccgcccactctccgccgccgccgcgtcgagcatcgctgcggcccccgcctcctcctaccgccgcatctcgtgggcgagcaacctcacgctcctcggctcagcctcgctcctcccgggcgcggccggcgtcgcgctcaccaccccttcccgcgacggcgtcggcgccggccgcgctctcttctcggagcccgtgcgcctcctcctgccccaggacgcggccgcctccgcctccgcctcgcgtgccgctaccccggcctccttctccacccgcttcaccttccgcatcacgccctcccccacctacggcgacggcctcgcgttcctcctcacctcctcccgcactttcctcggcgcttccaacgggttccttggcctgttcccctcctcatccgcctccgacgagggggagctccgcgacgtctccaccgtcgccgtcgagatcgacacccacctcgacgtggcgctgcatgacccggacggcaaccacgtcgcgctcgacgcggggtccatcttctccgtcgcgtccgcgcaaccaggcgtcgacctcaaggccggcgtgcccatcaccgcctgggttgagtaccgcgcgccgcgccgccgcctcaacgtatggctgtcctactcgccgtcccgccgccccgagaagcccgccctctcggccgatgtcgacctctccggcctcctgcgcacctacatgtacgcggggttttcggcctccaatggcaacggcgctgcgcttcacgtcgtcgagcgctggaccttccgcaccttcggcttccccaactcttcatacgccccgccgccgaccaagtacataggcccaatgccacccaataaccagcctctccctccccctccctctccctctccctctccccctcccccttcccctccccctccccctcaccctaaccaccgccgccgccatctgttctacaaggtgcttggcggagtcctcggtggtatggtattgctgggccttgtcgtcgttggttctgctgtcttgcttggccggtcagtgcgccgcaaaaatcaagaacatgcagtggcaagcgaggacatgggggaagcgacactctctatggaggtggcacgggcagcaacaaagggctttgacagtggcaatgtgatcggcgttggtggctctggtgctactgtgtatgagggggtgctcccctctgggtcgagggttgctgtcaaacggtttcaggctattggatcgtgcaccaaggcatttgacagtgagctcaaggccatgcttaattgccctcatcacccaaatctcgtgccgcttgctgggtggtgcagaagtaaggatgagcttgtgcttgtttatgagttcatgcccaacgggaatctagactctgcattgcacacactgggtggggcaacacttccctgggaggcacggttcagggctgtatatggtgttgcatcagcgctagcatatctgcatgatgagtgtgagaaccggattatacatcgtgatgtcaagtcatcaaatgttatgcttgatgcagagttcaatgctcggctaggtgattttggccttgctcgcactgtgagccatggtgggttgccacttacaacacagccagcaggcacactggggtaccttgcaccagaatatgttcatacaggggtggctacagagcggtctgatgtgtacagctttggggtgcttgctctggaagtggccactggacgaaggcctgctgagaggggaatctctgttgttaattgggtgtggactctatggggtcgtcgaaggctggttgatgcagcagaccggcggctccagggacgatttgttgcagatgagatgcgacgggtgctgcttgtgggtctgtgttgtgtacatccagactgccggaagcggcctggtatgcgaagggtagtcagtatgcttgatggtactgcaccgttgatattggtaccagataagatgccaccagttcttctacagccagtaccaaatgcttcatcaatgaactctgcagatactgccaatactgcattcttcagttgtcgctgagcatacaagttataggttagcgaatacaaatttcttattcatatcatctatagtcatgttaatgttttgaaccatcttctgttctttcctgctaaagacaaaaaaggtcaaatgtaaataggagactgttctgattgttacaaaaatgttgcttgatcttaactgttaagcgtagcgaatgactgctttttgagggaacctgtagagagttttattttctgactcaaaaccacagttaaacatgtcatactttttactgctcagatctggtgtcagtcgtttgaagatagttttgatggtatctgtaatgcatgtcttatggtctgtgcagtttgtcctgacaaaatttgacattaccatcatgttttataatagaaagttcaatcctaattctggcatttaactgcctggaaattgctgtaatgtgtatcatgaaaaatgtagcactgcctccaatgttgatgcaaatgcaacaaatgtctgctgatgtagagcaaataaaatttgtcattgcttgtgctttgtaagtttgctgaaacattaataaagcatgacaagaatgaagatattgtatgctgctgaatagttacttcgaaagttttagtagcaaccaaacctttactaattgttgtgactgttgaattgattgttaataacgtttatgtgaagcaggttagatgtgaactctggattaacagacaatttgattgttgtacaacttgtagaagttcagaattagacaagcacttgaacatattttcttttgcttcactttatgagtagcaaattgaagctactctgttgggcgaattgtcagaaagagcttactgttagacagcatattgggagctatgttaagaaggaaaaactgttagctgcatctagttgtatcgagaatatttcatccagtaattatttgaatttgattaagtttcatttgtcccatattctagctatatctcccatgaccattcaaatgctttgaaagtacacatagttgatcaatgaaataattctgttgtagtgttgttgccatggttttttttatcttcattatatgcggatcaattgactttaccttttttttttcaagatgtatacaatgcttaaggtactaaggtatatccacttggaacacatcaattgctagtcactttaatgtgactaataccttcctgtcaatatttctaaaaagtaaaggtacttctagtacttacaatttcaggcaccacaaaatgtcccctagttttcatcatatcattgtgagtatggacaaggctgtacaattatgagtagtttccctgacatataataggttggtctaacacatctgtaatctgtgtagaatgctctatatgtactgaaatctttcaaattattcagggttcatttgcctcatgtttgcttctttggataatttgatcgcttctgcagcacaagcatatgatcaacttgggaaattttgttctacagcctatatggcactgataagatgacctggatatgtagaatggatcaaccagcgttgccctttgtgttgttttaaagctaaggcattgacctttgtaccgaacaagaattttttgatgcgggctctgctcactctgcttcacctgctgggtggtatgaaaatcctgatagttttctttaccaagaatcgtaactagattcgggaatttctcttatgctatctttatttgtcccaatcattgtacatactttgttctgcaagtaatctattctggaaggcataggcagatgcgtctctggcatacctaagttaagaaccattattagtcttccacagtctatcaacacttgttgctatgtacagcagtttctgcatgagagactagacaaaattgatttcaatctatactgtagtcctagtctgagtcctgagttcctgactaggtggtgcagtagagtggcctcctttggaacatgaattagttcatttcctgcattcctgtaaaattagttcatttcctttgagacatgaattatcctcctttgctggaatttcatttcctgtaaaattcctcaaaaaatcctgcattccgaagtatttttggagctgacttcatcgaaataagcaatgtcagagaaatcttttagtagtatatattgcaattttcgatgaggctgatcgcacttccgattatgagtacacgactcattcattggtccatttcaatgtgtataccttgttttcaaagaattggtccaaacaattccagatattacctgctctctgagaatacattgtcttgtggttgctggcatttccatcatgtttgttaccaggtggtcacatatttatagttgcatctcttatctctgtatatttatgctatttcccctttggaggttagttacctgcattgtccattcgtaatcgatatgtggcctacaggctagagatttgtgatctcagccggggctgccatggaattggcaggaaggaagaggcaattgcaagcagcaagccacaaatcatatcaagggaggccagcagatgaaagaatcggtgtactgtgtacaatcaaattcatagtgcagacgcactaagcctcgatcgatctgtacacgacaaatattcagacggacaacgagacacgccgactgaagtcacgaggccagtctttctctcggtaacagtgtacggttgataagggtaagatgtattgatcgatatcactaggaggactcatcagcagccatgcttgacggagcaagccaccacctgagcccagtgcctcagccgtgtcttgatcagctgagggttgtcacctggagagaagatcgtccatgcgtcggcgtggggaaaactgagggctcgatgacgcgccggagatcagcgtggacgacgacagcgtcgacgtggggctccgcagcttggagccgtcggagaggcgctgccggttgacggtgaagtagaggtcgagggccgggagggtgtcgcagaggccggcgcctcctttctccttgtcgaaaccgaacccgagctcgaaggagcccctcagctcgtcgaggtctgcgtcggtcaggcaccgcccaaagccttctctgctggtcgcggctgcctcgttcacggccaccaacactagtacagatcctttcatccgtgacggcccctaacaagactggaatttgcgggccgtcacaaggaagtaatctcaatcgggccgaagtttcgcccgattgagatatggtcgcacaactatggtagatcggcataaaactagagcccgtcagggaagacacttatctgtgacgggccatagttgagacccgattgagatgagggttccatatctcaatcgggccctaaaagaagcccgtcacagatgacggttatctgtgacgggctccaactagaggcccgattgagataagtttaatgcccgtcacagatgacactcttctttgatgggcttttattaaggcccgatagagattacttgtatgcccgtcacagttgattattttagggccgttacagatatttgttgcacagtataataccccccaccacctagtgtaactgtatcccactgttcactattttggtgggaggctgtagggggcgattctttgtcttttttccaaggaaaacagaaaattcccaaaagtgatcaaaatggagcaatcaagtgagtaatattaatcattacttgagcaatttcatcacgtattactttagcaatactgatcttataacatgtgcctctaatttgtttttattattttgtagcaattgatcgaagttggatgtatgcgaaaaatgtgaaacgtcattttccggagtacagaaatggcgtaataaattttatgaacgctgcggaggaggataggaaaagaagaaacaacgattacatgtgttgtccatgtgcagattgcaagaatgagaatatatttgatagcggcgaggatgtacacggtcatctgatataatgaggattcatgaagggctatacatgttgggtgaaacatggagagcaagaatcaggaagtggagcaacagcagacagaagtggtgcgcataatcaggaagatgaagatgagtatgacatgacatgtttataccttctccattggccggtgaaatggttgatgtggaatacgatctgctgcaagacatgttacgtgacgttgaggacccagcccagaatgagagagattccatgaagttcagtaggttggtcagtgattctgagacgcctctgtacgctggatgcaaagcaaaacacactaagttgtcagttaccttggacctaatgaagctgaaggcaagtagtggatggacagacaagagtttcacagatcttttaggaattttgaagactatgcttcttgctgagaacacattgcccgagacgacatacgaagcaaagcaggttctgtgtccactggggttagaggtctgtagaattcacacttgtccaaacgactgcatattgtaccaccagcaatatgcggacttggatgctagtcctgtctgcaaggcttcttgatacaagcgaaagaaaagtgctgacgaaggaaagaagtcaaagaggggtggtccgacaaaggttgtgtggtatctacctatcattgatcgtttcaagagaatctttgccaacccgaacgaagcgaagttagtatattggcacgccacggagagaaggaatgacgacatgcttagacacccagcggattcgattgaatggaggaatatcgatcgaaaacacaaagactttgctgccgaccctagaaaaatgaggatatgtttgtgtacggatggcatgaatcctgacatgagtagtactcacagcacttggccagttcttattgcgaactataacctcccgccatggttatgctttaaacggaaatatattatgttgtgcttgttaatccaaggttcgaggcaacccgacaatgatatcgatgtattcttggagcctgttatcgatgatcttgagattctttggaaatgtgtggaaacttgggatgcatatggtcaggagaacttcaagctaagagttctattgttctgcaccattaatgactccctgtactcggtaatctttccgaataaactataaaaggaaagaaggcatgctccgattgcaaggaacatacacgaagccggtggctgaagaaatcacgaaagatggtatacatgggtcatcggaggtaacttccgctacgtcacgcatttagaagaaagaagaaaatttttaacggtaagagagaacttcagtctgctcccaaggatttgtccggagatgaggtccataatatggtcaaggacataaataatgagtttgggaagaaaagaaaatgtagcaagacaaaggagaagggtatgaggaagaaaaaatccatattttggcggctaccttactggaaagatcttgatgtctgtcattgcaatgatctcatgcatgcagaaaagaatgtgtgtgagagtttggttggcctgatgttgaatattcctgggaagacaaaggacgggttgaacgcgcgccttgatctacaggacatgaatattcgcagtgaactccagcccatacgagatgcagagataggtagagtgtacctccctccagcctgccacacattgtcgaaggatgagaaaatcgcaatgttatcatgcttgaaggatattaaagttccatcgggctattcagcgaggataagtaagtatgttaaattggacgatctaaaactggttggaatgaagtctcacgatagccacgtgctaatcacataaatcttgccagtagctatcagaggcattctaccaccgaaagtgcgtcacacgatccaatgtctgtacgccttcttcaatgcaatcggacagaaggttatagatctagaaaatctagatgggttgcagaccgatattgtgaataccctctgtcacctagagatgtttttcccactgtctttctttgatatcatggttcatctccctattcatctggtgaagcaaacaaaactatgtggcccggcttttctaagggaattgtggccgtttgaaaggtacatgggagttctgaagtcctacgttcgtaacagagctaaacccgaggggagcatcattgaaggttacacaaccgaggaggctattgagttctgcgtcaattacatgttcgatgctgatcctatcggagttccagtgtctcgtcacgaatgaaggttgtcaggtgttggcacaatcggacggaaatgaattaggcccgatcaagcgtcctacgagcaggctcattacgctgtgctccaacatatggccgaagttggcccatactttgaggagcacttagcgaaaatccgagatgagaacttgggcaatatgatacatggattaatagagaatataattctcggttcaacgaatggttcaagaatcgtgtgacaatgtccacggatgtcccaaatgagacagtacagttgttggggatgggatcgtcttggaccgtagacacatggtaaggatacgatataaatggatacacattttacaccgttaaacaagatgacaaaagcacattgcaaaacagcggcgtccgtatagatgcattccaggatcaagttgggtcaaacacatactatggccgcattaaggagatctgggagctaaactacatcaagttcaaggttcctttgttccgctaccgttgggtgaatctacacactggtgtcaaagccgacaaggaaggtttcactttagtagatctatcaagggtgggatacgccgatgaaccatttgtacttgcgaaacaggtcgagcagatattctacataaaagacacttcaaacaagaagatgcacatcgtgagggatggcaagcgccgaattgtaggagttgacaacgtcttcgatgaagaagaatacaaccagaatcttcatgtaagacctcatattgaccttgacgatgatccgcaagagcctgtggcatatgctcgttcagatcatatggaaggcataaccttgtgaccgatgcatttgtacgtatctattgtaatgaatgaagtatttttgtttgattacaaagacttgatatgtgtagttatttatatggctaattttgtttttttttacaaatgttgtttaaatatgtcatacattcaaattgaatttcaaactgttgggaatatagttatacataaaagtaaccaaaataaaagttgtagatcttaaaaggctctacaactttgctgtttatggcttttccacttgaaatcatttagtatttacgaatgttgttcaaatttgttgtatattcaaattcaattttatactgttgggaaaaagttatatagataaatgaccaaaataaaacttgtagatcttgaaaggctctacaacctggttgttgaccatatttacatttgaaatcatttactatccgaaaatgtattatgactaataaaatgaattattatacaacatctatgtattttgcactcacaaatataaagacttgatgggaaaaaatggaaaaatagtcatcagtgatgggccttagtttaagaccaatagagattaatctatctcaatcgggcattgccgtagggcccgtcacaaatgagtcatcggtgacgggctccatactaatgcccgattgagatgacaatcaggcccgtcacgaatgagtcatcagtgaccggccatagggtaatgcccgattgagatagattaatgtctatcaggctataactaacgcccgtcaccaatgactatttttccatttttccatttcaagtatttgtatttgtgagtgcaaaacatatagctgctgtgtaataattcattttattagccataatacattttcggatagtaaatgatttcaaatggaaatatggtcaacaacaaagttgtatagcctttcaagatctacaacttttattttggtcatttttctatataacgttttcccaacagtttgaaattaaatttgaatatatgacaaatctaaacaacatttgtaaatactaaatgatttcaaatggaaatatggtcaacaacaaagttgatcctctcatcaagatctacaacttttatttttgtcattttcctatataacttttttcccaacagtttaaaattgaacttgaatatatgacaaatctaaacagcatttgtaaatactaaatgatttcaaatggaaaagtcataaacagcaaagttgcagatcttgataagttgtacaactttgatgtttatggctttaccatttgaaatcatttagtatttacaaatgttgtttaaatttgtcatatattcaaattcaatttcaggctattggaaacaaagttatatagacaaatgaccaaaataaaagttgtagatcatgatgagaggatcaactttgttgttattgactttttcatttgaaatcatttactatttacaaatgctattttaatttgtcatattttcaaaatcaatttcaagctgttgggaacaaagttatatagataaatgaccaaaataaaagttgtagatcttgataagctctacaattttgttgttgaccatatttagatttgaaatcatttactatccgaaaatgtattatgactaataaattgaattattatatattttgcactcacaaatataaatacttcatgggaaaaatggaaaaatagtcatcggtgacgggccttagtttaagcccgatagagattaatctatctctatcgggcattatcttagagcccgtcacagatgagtcatccgtgacgggcctgaatttcatctcagtcggacattagtatggagcctgtcaccgatgagtcatctgtaacgggccctacggcaatgttcgattgagatgactcatcactctaccataactagggtttctcagatcggatcgaaactttttctaagtcccgctacagtttcctgcctccttagaaccctagcgcagtcgtcgttctccatcgccgagcctgccgccgtcgccaccgagcccgcggctgccgccaccgagcctcctccgccctccattcggaccgccgctgcctcctcaccgacaacccccaccgagcccacggccgcctccaccgagcacgccaccgccagcccggcgcagccaccactaaccccggtgacgccctccaccgagcccggcgccgccgccatcgaggccgccgccgccgccaactcctccttcgctgactcctccctcgccgagcccgaggccgccgccaccgagcctaccgcctccaccgagcctcggacgcccgacgccgcctccaccgagcacgcagccgcctccaccgagcctccgacgcccaacgccgcctccaccgagcctggcgcagccaccaccgaccccggcggcgccgccactgagcctgccgcctccaccgagccctgtgtcgacccacaggtgagtcctccatcgcgcatgaatgatgaatagatgaatgtggttcgattgatgaatgtgatgaataaatgattagatgaatgtgtttgaatagttgaatgtgtacggatagatgaatgtggatgaatagatgattagagatgaatgtggatgaatagacgaatagatgaatagatgaaatatttactttatttatatgtgatattcaattcattttacatgtggatgaatagatgattagatgaatgtgtatgaatagatgaatgtttatggatagatgaatgtggatgaatagatgaaatgtttaatttatttatatgtgatattcaattcagtttattagatttgtgagatgtgcaatttagtttatttatgtgaataagtgattttagaactttggattctaagccattgaagcactgaattgtaaaaaaagtagacaatatctcagcaaggcgaatcaatgtcgacgacaactagtgggtcctcaagggcacgtactcctaggacagggaacataatccctaaggaacggttccacataacagcggtggaccaagtagggttgccgacatctccaagaaaaatattgagccgatttaggtctatctacggggtcatagggaggcagaaattcagtattctgcaagatgacatcaagcacgtgccggccacagagaaggacattgcttggctaatgttcaagttgagcttcgattatcctgcggagcatgaggaccatatcaggcgggctgctttcaaggttttgggcaatgcttggatgaacttcaagactaagctagtcggcgagttcatctacaacccggcgaatccagatccaaaagagaaatttccttggatcatggaacaggtctgagaggaataccatgcgaagaagtcgacccccgagtccagagctagaagcgaggcatattgcttgctccagaccaagaaccagcatccgcaccgccttgacaccgccggatatgccggtaaggaagaggaatggcagcaggaggatgaacaagaggaggaatcgagcacgccgctcgtgtttggcgatatcccatacccttgggctaggaactgggctagggcaaggtaccagaagaatgctgatggcacaatcttcatgccaaattcagaagatcaacgagtgtacgatgctatagtaagtgtctagtcaaaatagatgttcgcattgtttcccgtattgtagtttatttaaccacactaaattgaaacgcagaaggagttggttgccgaggaacaagcctcgcaagaggcctgctctcaaagacgcgaggacgacctattcacgaaagcgttgggcaacaaggcacaccgtggacaaacacggggcgttgggtcttccgttccctggaagtatgtatttccagactacgcgtgacagtacaagaagcgaacttccaacaaggcggagaaagatgcacgccttgaagccaagatccgggcgtcgataagagcgaagctgacatttgaattcgacgaaaagctcgagtcgatgagggccaagattaggcaagagatccaagaagagcaacagaaaccccaggccgccgctgctgctacgcacgaagagttaggaagtcccacccaaaaacacagcagttgcgcatcaactgagttggcggaaaatccaacatcggtcaacagcgccgtcgaccacataacggtaaaagtttcgtccacaatgcatgaaagacttaaccaatccatatgatatataatattctaaaaaaatgatgaatctatcgcaggaaccaacgagctacaccctcacagttagggtgatgccgaccttcaccgttccagcagccgagggacttgcgtacaagccgaccccagagacaagagtgcatggagcgcaactcaggggcgactgtgcgaaagttcaagtcgactctgtgaagcccgaatacgagctgttcccactgaagtatccaccgaacgacgaggtcctctcactaggaaatgcccgtggtaccttcatccaatggcccaaggacctcagaggcattctaccaccgaaagtgcgtcgcacgatccaacggctgtgcaccttcttcaattcaattagacagaagattatagatccagaagatctagatgcgttgcaggccgatattgtgaataccctctgtcacctggagatgtttttcccactatctttctttgatataatggttcatctccctgttcatctggtgaagtaaacaaaactatgtggcccgacttttctaagggaaatgtggccgtttaaaaggtacatgggagttctgaagtcctacgttcgtaacagagctaaacccgaggggagcatcattgaaggttacacgaccgaggaggctattgagttctgtgtcaattacatgtccgatgccgatcctatcggagttcctgcatctcgtcacgagggaaggttgtcaggtgttggcacaatcggaaggaaaagaattaggcccgatcaagcgttgtacgcgcaggctcattacgctgtgctccaacatatggcaaaagttggcccatactttgaggagcacttagcgaaaatccgagatgagaacttggggtgatctgatgcatggattaacaaagaacataattctcggttcaacgaatggttcaagaatcatgtgacaatgtccacagatgtcccaaatgagacagtacaattgttggggatgggaccgttttggaccgtagacacatggtaaggatacgatataaatggatacacattttacaccgtcaaacaagatgacaaaagcacagtgcaaaacagcggcgtccgtatagatgcattccaggatcaagttgggtcaaacagatactacggccgcattgaggagatctgggagctaaactacgtcaagttcaaggttcctatgttccgctgccgttgggtgaatctacgcactggtgtcaaagccgacaaggaaggtttcactttagtagatctatcaaagatgggatacgccgatgaaccatttgtacttgcgaaacaggtcgagcagatattctacataaaagacccttcaaacaagaagatgcacatcgtgagggatggaaagcgccgaattgtaggagttgacaacgtcgtcgatgaagaagaatacaactctaatcttcatgtaagacctcacattgaccttgacgatgatccctaagagcctgtggcatatgcttgttcagatcatacggaaggcataaccttatgatcgatgcatttgtacttatctattgtaatgaatgaagtattttgttttattacaaagacttgatatgtgtagtcattaatatggccaattttgttttattacatatgaccaaaataaaagttgtagatcttgatgagaggatcaactttgttgttgaccatatttccatttgaaatcatttagtatttacaaatgctatttagatttgtcatatattcaaattcaatttcaaactgttgggaaaaaagttatatagaaaaatgaccaaaataaaacttgtagatcttgaaaggctctacaactttgttgttgaccatatttccatttgaaatcatttactatccaaaaatgtattgtagctaataaaatgaattattacacagcagctatatattttgcactcacaaatacttcaaatgaaagatggaaattgactcatcggtgacgggccttagtttaaggcggatagagattaatctatctcaatcgggctttgccgtagggtccgtcacagatgactcattggtgacgggctccatactaatgcccgattgagatgacattcaggcccgtcacggatgactcatctatgacgggccctaagataatacccgatagagatagattaatctctatcgggctttaactaaggcccatcaccgatgactatttttccatttttccaaacaagtctttatatttgtgagtacaaaatatatagctgccgtataataattcattttattagtcataatacatttttggatagtaaatgatttcaaattgaaatatggccaacaacaaaattgtaaaggttatcaagatctacaacttttattttggtcatttgtctatataactttgttcccaatagcttgaaattgattttgacaatatgacaaatctaaacagcatttgtaaatactaaatgatttcaaatagaaatatggtcaacaacaaagttgattctctcatcaagatctacaacttttgttttggtcacttttctatataactttgttcccaacagcctgaaattgaatttgaatatatgacaaatttaaacaacatttgtaaatactaaatgatttcaaatgggaaagccataaacagcaaagttgtacaacatatcaagatctacaacttttaatttggtcacttcttcatccgacaaagggatagtaccaatgtttacaaaattgacatatctgtgttgatgtttataaaccagatgagagaaatgtgatttttttaataatataactatcactttgtcggatgaagaagtgaccaaaataaaagttgtagatcttgatgagaggatcaactttgttgttgacatatttccatttgaaatcatatagtatttacaaatgttatttagatttgtcatattgtcaaaatcaatttcaagctgttggaaacaaagttatatagacaaatgaccaaaataaaagttgtagatcttgatgagaggatcaactttgttgttgttgactttttcatttgaaatcatttactatttacaaatgctattttaatttgtcatattgtcaaaatcaatttcaagctattgagaacaaagttatatggacaaatgatcaaaataaaagttgtaaatcttgataacctctacaattttgttgttgaccatatttcgatttgaaatcatttactatccaaaaatgtattatgactaataaaatgaattatcatatagcagctatatattttgtacttacaaatataaagacttgtttggacaaatggaaaaatagttatcggtgatgggcctttgttaaagcccgatagagaaaaatctatctttatcgggcattatcttagggcccgtcacaaatgagtcatccgtgacgggcctgaatgtcatctcaatcgggcattagtatggagcccgtcaccgatgtgtcatctgtgacgagccatactgcaaagcccgattgagatgactcatcactctactataactagggtttctcaggtcggatcgaaaatttttctaagtcctgctacagtttcccgcctccttagaaccctagcgccgccgtcgtactccatcgccgaacccgccgccatcgccaccgaccccacgggcgctgccaccgagcctcctccgccctccaatcgaaccgccgccacctcctcaccgactacccccaccgagcccggcgacatccttcctcgtcgtcatcgcctcctcctctccgacgctcgacgccacctccaccgagcacgccgccgcttccaccgagcctggcgcagccaccaccgaccccggcgacgccctccaccgagcccggcgccgccgccatcgaggctgccgccaccgccaactcctcctccaccaagcctccgacgcccgacgccgcctctaccgagcacgccgccgcctccaccgagcctctgacgcccgacgccgcctccaacgagcccggcgcagccaccaccgaccccggcgacgccctccactaagcccggcgccgccgccaccgagcctgccgcctccaccaagcccaaggtgagtcctccatcgtgcatgaatgatgaatatatgaatgtgattcgatagatgattagatgaatgtgtttgaatagttgaatgtgtatggatagatgaatgtggatgaatagatgattataaatgaatgtggatgaatagatgaaatatttaatttatttatatgtgatattcaattcattttacatgtggatgaatagatttatagatgaatgtgtttgaatagatgaatgtttatggatagatgaatgtggatgaatagatgattagagatgaatgtggatgaatagatgaatagataaaatgtttaatttatttatatgtgatatccaattcagtttatttatgtgaataagtgattttagaactttggattctaagccattgaagcactgaattgtgtattttcgttattttgaaaaaaagtagacgatgtctcagcaagcgaaccactgtcgacgacaactagggggtcctcaagggcacgtactcctaggacagggaacataatccctaaggaatggtttcgcataacagtggtggaccaagtagggttgccgacatctccaaagaaaatatagagccgatttaggtctatctgcggggtcatagggaggcagaaattcagtattctacaagatgacatcaagcacgtgccgaccgcagagaaggacattgcttggctaacattcaaggagaggttcgattatcctgcggagcatgagaaccatatcaggcgggctgcttttaaggttatgggcaatgtttggaagaacttcaagactaagctagtcggtgagttcgtctacaagccggcgaatccagatccaagagagaaatttccttggatcgcagaacaagtctaggaggaattccatgcgaagaagtcgacccccgagtccagagctagtagcgaggcatatcgcttgctccaaaccaagaacctgcatccgcaccggcttggcaccgccggatatgccggtaaggaagaggaatggcagcatgaggatgaagaagtggaggaattgaatacgccgctcgtgtttggcgatatcccacaccctcgggctaggaactgggccagggctaggtaccagaagaatgttgatggcacaatcttcatgccaaatccagatgatcaacgagtgtacgaagctatagtaagtgtctagtcaaactagatgttcgcattgtttcccattgtgcagtttatttaaccccactaaattgtaatgcaaaaggagttggttgccaagcaacaagcctcgcaagaggcctgctctcaaagacgcgaggatgacgtcatcacgaaagcgttgggcaacaaggaacaccgtggacggacacggggtgttggatcttccgttccttggaagtatggatttccagactacgcatggcagtacaagaagcggacttccaacaaggcagataaagatgcacgccttgaagccaagatccgggcgtcgataagagctgagttgacatctgaattcgacaaaaagctcgagtcgatgagggccaagattaggcaagagatccgagaagagcaacagaaccccttggccgccgctgctgctgcgcacgaagagttagaaagtcccacccaaaaacgcagcagttgcgcatcaactgagttggcagaaaatccaacatcggtcgacagcgccgtcgaccacataacggtaaaagtttcgtccacaatgcatgaaagatttaaccaatccatatgatatataatattctaaaaaaaatgatgaatctatcgcaggaaccaacgagctgcaccctcacagttagggtgatgccgaccttcacggttccagcaaccgagggacttgcgtacaagccgaccccagagacaagagtgcatggagcgcaactcaggggcaactgtgcaaaagttcaagttgactcggtgaagcccgaatacgagctgttcccactgaagtatccaccgaacgacgaggtcctctcactaggaaatgcccgtggtaccttcatccaatggcccaagaccttattgagatcagggttacagcgaggccaaccactgcaccaggcggtcgtccaccaaagagatccgcctctgctccttcagcccctcctgctcaagatcgtcatgcacaatcttacgatgtgcagttgcagtacgacacggattttggggaggaccgaacggaggccgacagcaaggcgattcatgaacccccaccgatgaagaagagcaggaaggcacactcttcccctcagagaattactctcgataaactcgaagcaaaggggagaggaaggggaggaaaggtgtaggcatcgcttctagctccaaggaagctagatctgggcaagggccaggaagagactaagggcaaagaggtcaagaaaaaatacgtcgctccacaggagttccaactaggcatgccattggttggagatgacgtgcttgccgcaatgggcaccgcttgcaaggaccttcacgcatactacatggagaaatctaatgccaggaagccaaataaagctacggatatccttggagagcacgatggaaagccattccttggtccaacaaattatatcgtggtcgacttcaaggatctattcgacctctacaggctccgagcggtggacacaagcctccttaagtgctactccttgtaagtattgtcgcccaactcaatctggtaataacaatcggattaactcgcttacaagatcgtttatcctgtgtgtaggttaagttggcaatggtgtcagaagaatgcaccggaagttgccttccttgatccacaagtggtcattgtcacaaatctccagaatgaccgtacgacaccttgtggtcccgccgagacaaggagtacattatgtgcgcctataatcaatagtaagtatgttatctaaatatacacaacagcatgacacattccttcagtacttaattaactttcactatattaatgctgcagtgcccattggatccttctggtcataacacctaagtggagttcatgtcactacctgaactccagaattgataagaacgcatatgattcgaccccaattcaactagcgatagatgaagcgtgggcccaatacgtgcaaagaggaggcctcaggaagacaggacatgacaccctcatccacaaaaaagtcttcccggtgaagcaacaaataggtgaccagtgcggattccatgtgtgccacaacatgcgccttctgtacagagaaaaggtgaagactttggctgagtttgaggtcggtggtctcaattgtgatagactaactacattttagtacttatatatgattgatcaactaatctggaattatgacaatgtagggcataataaccaagtctctgcctaccagctttgaggaggttcgcaaggagatagccagcttcatcctccgtgaaataattaaccccaaaggaatgtttaggattaaactaaaatgatgaacaatgttgaacttttatgtttaggcaatgatgaacacttattatgcaactgtgatgatgtaactatgatgcttatatttatatatatatttcatatgtttatgttaagacttgctaaataaatatttgatccaattaactcggttttgcaggtgaaatatgataaatatttgaatggatgtgaaatatgtgaatggatgtgaaatatgagatgactgtgaatgtgtggttgtgtgaaatatattgatgtctgtgtatgttaatgcatatgtatatgaatgggtgatgctggggagctggggatattggatatttgtatttgtttctgtcatttttgcagcaggcatggctagcaaaggtctgaggctagccaaaaaacaaaatttattttttttgtgaattatagtcatcaatgacgggccataactaaatacccgattgacgggccataactaaatacccgattgagatgatggtcatctgtgacgagctctagtttaggcccgattgagatgagtatcatctgtgacgtgctctagtttaggcccgataaaggttagtagtcatgtgtgatgggcgctagttgtggcccgattgagataggtcatctgtgacgggctatagtttgacaggtcgtctgggtcaaagctatcggtgacgggctttacttagggcccgattgagatagattcatccgtgatggccgtttgcccgattgagataactctacacatcagtgatttctagcctgtgacggacgttgtgcccgattgagatggggcttaccgtccgattgagatgagggtatctgttctagtgtcatcaaattaacaccaccgcttagcttaatagccgccgctgccatgcagatgggattttagatattctgcaatcaactgcgccgacggacactagtggattagtagctttaagcctcctgttggtctgttcgttgtgtatgcatagatctctctccagactaatagctcggttcttctgttgtattgtcatatgtagatgcagggtttggttggtgtgttcttcctgggagaagccaatgatacagaagctggtgtttttgtgtccggcgtacgtctccggtagtcatccagtcaatcactggtcgacgctacagaagggtcaccgggccggcgctactgttcgcggggggagccgcgcggcgtagcttgaggtgggatgggctggatgtgggctcaattttccatggacgaaaatgcccccactaatgacaattagtctgttaatccacatttaatctcaaccactgatgcgctttaattttcgtgctagttttttttctggaggagcatagaagcacgtctcgattagagatctatcgtaataagttatctgattctttcagcttacttctaataatagattataataattctaaactgaatcaaacaggtccttaatgtgcgtactcaagaaaattttgaagcaaacaactaaaacgaaagcagttttctcgagtggaagagacctaaagttcagaaacgctaattagcgcgaacgcgctggcagcacagacgctgccaacagccaaatcgtgctagcgctagtttcttttttttttcactcccgctcactttttttttctccacgcacacgagtgatttttcttttcatgatattttataaatttaattattcacctccaatttgagttgaaagtttttaaaatttaagttgaatattttaaattttgagatgaaaaaagttttcaaatataaattgaatattttgaattttgaggtgaaagttttcaaatcttgacttgatttttttcaaatttgagttgaatgttttcaaatctgagttaaaaaatttcaaatatgagttgaaatttcaaatcttgagttgaaagtttaaaatattcacttgaaaaatttcaaatatgagttgaaagtttcaaatattaacgtgaaagtttttttaaatctcgactttaaagtttttcaatgagagaaaaaatagtagattagataaggtgtgcactatttcgcttactagcgctaaataggaaggaaaaagtacatcgaaggtccctcaacttgtcatcgggataaaaaacatcctcgaaccacaaaaccagatatacggagttccttaactatacaaaaccggtcacccaaggtcctttggtggttttgaccccggttttgatctatgtggcggctgagtcagcgtgggacccacgtgggccccacatgtaagcgtggccacgtcagcctctcctctcttcccctcctctcccttctctctcacttctctcctccagggcggccggcgacgcggcggcgggagcatgagggtgtccggagctcgtgaatccggagccggcgccggcgagtgtggtggcgggggaggagtctgggatggaggagaagaggacggcgcggctgaagacgggcagggggtggcggccgccggccggtgggaagaggcgcgcagtggccgtcggacgcgtcccatcctccttctgcgtgggggaggggaaactgctctatgcctctatgcaacggattcatccaagaaatcctcaacatcttctcctgcagcggcggctacaaccggccgtaccaggccgtcgaccggacggcgaagatcctcgccgtcgctgcgttcttcctcaccctatgcatcgtgtggaaggtgcggcgcttgagggtgcgcctgctgctggcccgctcaccgggcgaggcggcgcacgtgccgagcaacgacaaggtgttcgtctactgctccagcgcgcacctggccctgttcgtggtcgtcctcacgctgaacagcagctgcgacgccaccgtcgagcaacacatcgggctgatgcaggacatgttactcctcccgcaggtgatcggcaacgccgcgtggcgcgtcaactgcaagcccctgcggggagcttctacgtcggcatcaccgtcgcgcgcctgctcccgcgcgtgtatgacctcgtgcgaccacgtgcggtggcgcgtcccaatcgtcctcgctctcccccccaacactctcgctgctgacgccctcctcttctcccacggcagcgacttggtgcgccaccgctcccgtcctcctaggctgccgccaccgtcgagccgtcttgcgaggcatggagtggatgtcgtattggggagcggatgtgggggtgcagggctggcagacggacggcgccccgcctcgacctcgctggccacaccgtccttggctgaagccatggcagcgacgccgggcagcaaggacgtcgaggccagcaccggcaccgccgcatccacggttgtcgtcatcgccatggcaagcgacgctggcaagctgtcgctgtgggcgctagtgaaagtggtggcgccgctccctcctctcccgccgacgccgccgcgcgctgctccctcctttcccgctggcaaccatcggggagaagggcggcggacttggtgcggctaccgcattgccgtattgctctcctcccctccatcttgctccctccccctcccctccctcccgccaccgccttgctcccctccccgtcgcttgctcccccgtggccgccaagctcctctcgctgccgccgactccaccgcccctcccctactcccgcgtcgttgccgcgtcgccgccttgctcccctcaccaccgctccttgctctcctccccgtcgccttgctcccaccgcggccgccaagctcctctcgccgccaccgacgcccctcccctgctcccgcatcatcgccgcgtcgccgccttgctctcctccttgccaccgctttgctctcctccctacccgtcttgcccagagccagagagagaagagtgagagaggaggaagggatagaagaggggaaagagagagtaggatgacctggacaggctgacacgtggggcccttgtgggtcccacgctgactcagccaccacataggacaaatccatcatcaatactggcctgggacctcgggtgaccggttttgtatagttaaggaacctcgtatatctggttttacggttcgaggacgtttttatatcccgatgacaagtcgagggaccttgggtgtactttttccaaataggaaccctcaatacagaggtggcacagtaagtcatgcccacgtgggccacaaactagctagcagtccgcatggcccaacttgtggctctaccggtgttggaggagggaataagttcacctgccatccctcaactttacaccgagtttgtttgacattccttatcctcaatatcagaaattttcacccctaaactatataaaacgtacaatttaggtcccatggcactatagatgtttggtttcgctgacgtggcattctagtcagaaaataaaaaataaaaataatatatgggtcccacatgtaagtgtgagaagaaaaaaatgtggggcccacctgtcagccccatcatcttagaggtggggggcagcggggccaatcggcatcgtattccccctttcccgtgggacgatctagactggcagcgtcgagtggaggagcttgttggcgatggcctcgtcgtgccagccctcagtgtcgcccatgataccagggctgagccgcaccatcagcacgtagaactccaccttgctcaacgcgttgtcgctgtcctggtcgccttcttgcaccatggctgtcgtctcctccaccgtaatctcgccaccgacagcgccgccccccaaccccagcacactcgccgcgcttcgccgcaggctcttcgtggtgatggcgccactcgtcaggtcggcaagcagacgaaacctagcacgaagcaacaacaaaaggctcttcgcgtgcacgccgccagcgacattggtagatgactcctgcttctgttggtgatgatggttcatttttgcaggtggagggcgtcggcggccgtggtggggtgggtgccagcgcagaggagggactaggcgcggcggtggagggatccggcgaggacgatgatggtggtggtgccgtgccggcgcctaagagggaaagggggcgagagggggtctgccccgccagcgagagatggaagagagggggctgcctctctggtgggagagaccctctccacgcgtcacgctggcaagagaaggggggtggaggaaggaggagtggcggccggcgtccggctaatgctattggcgcctcatcgcgacccaacttcggcaacaccaacccagctcgctggccggaaatagcgctccccctcctcctccgccgtcgctctacccactgcctcccgcttctccccccatttcccgccggtgcggcatgtggagagggtgggagagggagaggcgggcggcgggagatgggggacggtagcggtggccggctggtgctgctaacggcgagctattgctgtttccgcgcttgcctgccgccactggcctccctagcccgcttccccgatgccgaggacgacatcattgacctcctcctcgttgcgcttggtctgcgtgccgtggaagaaaagagaagaaagaaaggctgacacgtgagctcctcatttttaaatattttattttgttgactaggatgacacgtcagcgaaaccagatatcgataccgtcatgaaatctaaattgcacggttttgtataatttaggactgaagatttatggtattgggtttagggatgtcaaacaaactcgatgtaaagttgacggactactgttaaacttattccttccaggagcccatacaggcacggtggctcaaggcggcccgcagagcacacggttggtgcgcgcaagggcgggcaccacgagacgcagctgtaccggtgtaacatttgtaaataatcctcaaaaaattaaatttaaattgcaacgaatgaagtaaaaacgtgtgacggctacatgcgcagcggtgaaattcgtccacagatcaaaaggatctaccgcagattcgcaggatcgatatctgcagaggcgtagcggccacgaatcgcctgcgcgtctagctcaagctccgccggataagtacgtacgtacgtgacgtctttgcttttgcacgcgccgccgccggccgctatcccggttgacgattctgatccccgcgcgcggcgcgcgtccaccacacacacacacacacacacacacacacacaacgctttgctgcagcgtcctgtgcacgctcgcggtcgacctcaccgggaccccgggaccccgggcgcacgtggtcgcgcgcgcgcggcttgcggcgctggcccgaagcccagtgtgcgcttcacgtggcgacggcccgccagaagcctgcgccggccacgtgctgccctacatacatacgtacgttgcccggaagtcaatcggccgggcgagcgaatgatggaccgcgacgtacgggcacgttcaagccagccggccggccaagtggcaatctgccgactcgcgccgcgcgcgcgcgtcgatctccgaccgacgcgccgttgcggggtgcgggagctttcagcttttcgatctggtggtgacgcgtacgtgtttgcttttcgccgtctggggacaaacggatgcgtctggttgactgggtcgcaggaggttgaaggctcgtacggtgtgcgccatgggaattcctgttgtgctgctgtgtgtggcccgtgggcgctgggtgggaaaatattggcggcctaggactaggagtacggatacagaaagcagtgcccaactatttctagctagccaacacatcttgtactcctgtgtgtgtgtttttaattctgctttcttcttagtgaaatgatttgattggagatcgcacgcttcccaacctccttaaactttacgatttttttcttaaataaaactttcttatacatgattttctaataaattattttgaatctatttgttagcttatagtaatatttaatttattagtttgtacccgaataattgtttaaccattgaaggaaaaaaaaccattcagcctcacatctcaagttgttttcactgctacataaaagcttttttcatacggtcaaaacatattttcgcagataggcgtttgcccttaagtgtctgcaaaaatcgattttttcatgcaggaagtgcaccggcatgcgaaaaatgattttggcggacagtcagttaagccaatcgcatacgaaaataaagaatcactttaaacaaaataaaaataaaaaaacaaaatcccaaaaccctagctctcattcccaccccagctgtcgtcacccctcctacggctgagggtggcgctgctggatatgctgccctcgaacaccaccatcgccaacgcccctccggggaccaaggacagtgcccccggatctgctgccctcgatctctgtcgtcgccatcgcctctctcgatgccgagggcggcactgccggatccactgccctcgaggtctgctgttgctgcccggggctaaggatggcagatccgcccctccggagggcggcactaccggacccgccgccctcgagctccgccgtcacccattcaggggccaagggtgtcggatccaaccctctcgagggcggcgctgctggatccaccaccctcgagcttcttccatctcgcccgatatcctcatcgccacctccacaagccaccccgcgcgctggcttccttcgtagatctagagggggagaagaagtagatgaggcaaagagggagaagtagacaagggggtgggggggatctaagtgagagatgagagagaaatacaggagaagggagtcgggatgggccggttaaaaggaaaagggaaaatgaggaagtctcgaatgttgtttctatatgtgggtatcttaagaggcttatgaaaatcaatttttccatgcatcgcttaatcaaccagcatctaaatatttttatatgtggatactcttttagtttgccaataataaaataaagggtgaattcgccaaaattgttttgttaagtagtttttgttcccctccattagtgggttcttcaaagatatttgctcttatacacaacgcttctcatttgggtatagattcactcagattaagaattgttacatatatttgaactcaagaattaatttggtcaataccagcactccttttgctgtgattgaatgcttttgggctatctcgtactatgcattggatgcggtggacccagattatcccaattgcacatgaataggttcccgagagaaaaaaagagaaaagaggctcgtcgtccccacgctcttgtgggagcctgggcggtatatacaagcttgttgtcctatgaagttatatgcgattttaagcaacaggtcagttgtccatggtataagggacgatcactcactcgcatcgagcttatgcttcgatgtaaaccatcatcgataatcttttgccatacatcattctttattatccgtttcaggttataagacgttttgactttagtcaaagtcaaactgttttaagtttgactaagtttatagaaaaaaaggaataatattttcaacccaagacaaatttattatgaaaatatatttaattattgatttgataaaactaatttagtattataaatattactatatttgtctataaacttagtcaaatttaaaactgtttgactttgaccaaagttaaaacgtcttatatcctgaaatgaagggaggtattatgcaacttgtgacgcatacatcctgaagcttatcatttacgtaaggttgttttatggcaagctccgatgtagtggccagggcggtggcctcgagtggtagcgctagaggaggaagtagaggaggcctaggcggctggcagacggaccaagtgaacagctagcctggccatggcggtcatgcagtggcattcggagcgagcgaggagatgacaggggatccatgaggtggcccgatggccaattttctcccacgccagctcgattgggagcacgaaacggtgcccaaaatctgaattgatttgacaccgggattaggaatgcagcaaattaaaattgggtggtttttatcacttggaaacctcttggatggtttttatcttaattcctaaaatttaagttttgggattgctattagccatctctcggatatgctctatggaagccccatacaactatttctatttggtttcacatcttccaattaatcccttcttcagaatttgactcccgattcccataatacacatatctcttatcacaactacataacccttaataggaacaacctcatatgtatcgattcatctaaaaccaatacatattaagccttttttgtcctcatgatcccttcgatgggtctaaaattaaaaagaaaaagtctgaattatcccctgactattgggtgtgtactaattaccccctaaatctgaataccggacatctttcaccctcaactattaataccagacgaaaaaccctcctaactcaatctagagtggttttgatcctacatagtagtccagtcagcaattagtttttttttagaaaaaatcaacgggatcccacttcatactctcttccctccatcttttcccctctcacctctctctttgcattcggctcgggcaaagctccggtgacctacgaagacaagggtccactagatcgatgacaagggtcgctgctcgccgcctaccggtgtcctatctccatgctttttgtcgcctccgcagaaggctgaggaggaggcgcacgctggcagaggacaaagagaaaccgcttccccctctcgagctcctccgcccctctgctgttcagcaccgcctccataggagatgcgatcgatcgatggatgttgacagcgggggcgaggcgagctctccgtgggaagctcatcacttgtgttcgctgccaatgacgtcctccctgccacgccggccaccgtcatgcttggcacctcaacactgcccgcctcatcccccaacgcaacaaccgacaaagcatgagagagtagagagagagagatagaggagtgaggtatatgacaagggggaccatgttttttttattgttttttaattggattgccacgttagcgccacatgtatgccacgcagatcaaaatcgcttcgaattgagttagggggtagttcattcggtatatatagttgagggtgaaagatgtctagatttcgggtctagggggttaatttttactgacccaatagttcaagagggtaattcagattttttccaaattaaaaaccggcacctataacaccttataggttttggtttattcggaaaattggtattaagtaatcaaaatatcatttttttaataaaccgacactagtaagtgggattaagtgttgtttttaataaacacgataatttaagaatggagttgagccaacatcgagcatggtgctcgagaagacgaaaagttcttctgtgtccacatccatcttccttctgtgtactagaaaatatcctatcttgtcctaggcttttatattttgggacggagggattatctaagtaactgcagggttttttaagatcattttagattttatttgattcattttcactattcttaattggcatatattttttcaaccaaaacagtagggcgagatctgggttcaaattacattataaaggaaacatgatgttcaccagaaaaggtatataaaaaggaattaaagtgatggaaactaaagtattggttaaagttttatatttggaatcgttgatttagaaacatataaggcttaatgggacaatggacctgtaattataaagcacttcaaatctgtacatgtgtgcaccgagcactgtgcatggaggccacgaattgtttgggagaatgtgaatcttgtccacagaatttttctccaaaatatttacatgaaatatagctgatgaacgttgtatgccattggcagagcgctggtccacactctacaatagctcaacaattattgagattggtgtttcaatagtccagattccttatgtcagatttttcttttccagtttgaactgatcctaacttcagttcagaatcttaacaggaaatttcagccagtatagttagtaaaagctaccgtccacagcagtaaattaagcacggaaccccaggcggtgtccctagctagctagctctgggctctgtttcatactcctatgcatgcagcataagtgatgagccccacaaggccacagatgggcctgatattttgttgtgttttgcctggacagtgaatattttctacaagagacactagcaaataactaaatggaagagagctagagtttggaactcaacgaatcatcagtccatgcactatatttgctgtaaagagaaagtccatgcgataatggataagagctatacatggccagttcttccccatcttttctgctgataagagatagagttaactacatacgaaaagaaaaaaaagaaattaatgtcagtccatatgtgtgacttatggatttcccatctattacgaaaaacattcaaaagaaagggaaattagttttttctttttgttggttcttcattctcacgtactatatatgtgctgatatgcatgttatcgcaagaagttccataacagggaattatatatattgctcatgatgttttataaactgtactaaaaagtcaccatatttatcaggggcgtccctaggggcatgcagctagcgcgcccgcatagtgcccccaatttttaggggctcctaggcccaaaacttgaacactagatatacaactcaataagtaaattgatagcctaactagtcccaaaaatctattatttttcttgtcgtttcggcttcgattacgcctttgccggttcgcacagttgcgctagttcgcaatgttgaatcgcctcctactgtggacctcgccaatcgccaatcgcaacgaacgagaggagtaaacgacgcctcacctctttctctcgtgcggtcatgccgcctgacgcttgccgtgcccctgacctaattctttctgataatttctaatccggtaatccctaattttggattatcattttaggccattctagattgctatgaaatatattacgtaatataaattattttcatattatatcatcaattaattttttatccttcaactttgcacagggcccccgaatttgacgggatggccctgatatatttatttaaaaaaacatatctagattaaaattcccctgacatatatcaaaatgtttgagcttttggtccccagataacttctgcactactgccaaataattaacaaagtcacatgcagtcatccctactttaaacgcaggacagaacacacatacgtatcgttgttgccaacttgacatgcagataaaattgtcagttgtggctttattgtgggctagaaaacatctgttgatattccattgggattttgagacatacatacctcgaattaagtagaagctttggcataacacaagacacataacacaagacacatatatatacatgccatatagtcgacttgcgatttttgttagcacacgattggatttgtagtttcttaggttttgaacaaaagaatttacttaataaaatgatttatgttgctaaaataattccgcttccactgctacacaaagcctaataatatccaatggttcgcaactgcagtgatctctaatggttaaaggaattgttaaaaacattcagtcagatatttgagtgtatactaatctattggttcttgacctaatgggtcatgaccacaaactatatatacggtatatgcagtcaagggccattcgagatttgagcatatgtaatagttctcgatttagaaaccgttgaactttatttttgaaatatttaattattaatctgaggaggcgttcgaatttaaaaggtaatctcttaatgttgctggttcttgatttagaacaattacaatttaatctccaacaatttaagaaaacgaacagttagggattaacacgacaagctaatggtttatggcttattttaaaccaacatttaacagaatattaattgcatgcataaggatcaatttgtaacttgtcatatactccgtactaattactagctatgaaaactgtggatgtcttctcaaactattacaaatatgtgttaaatatttcagttaaaaaatatgtgttatagagatctgtttgagttctttctgaaaattggttatatatatatatatatatatatatatatatatatatatattatctcacaaaaatttaagtttaatttgaccctacctatgaaaagaatcagagactcttcttctgataggactaataattaaaccacacatagggggatggtgcttgtaattgtataattaagctgcacataatattggccacagggaaagagagaccgatcaatattatgtgtacagattacaatatttaaaatgtcgtgcaaatcatatgtgaaaaaactggtacataatttgtattgagacaatccaaattattccaaattaaacagtaaaaaggtacggttgagagtagggcatcggcgatcccctttctgcttgatctctggcagaatctctgcaacctgcatgttgcccccggcccctatgtatgtacttatatatgtatgcatgtgtacatataaatataagtatgcatacacatgttgtgctctctattgatgcattatttatgcagaaatatacccaaaagccaattaacctatagcaatgtcctcaccggcgcaacatctaatccaaaagctgcaacgccggcaggagaaaccccaaatcgatcgagctatagatctcgatctagtgatctgtgcatgctgatcatttgtgtgtacatcgatccttgatcgatcacacgcataccagtatatatatacatacttacactcttataatagcaggcaggcaagctcatgtggactgctgtagctataagctgtcgtctgatcgatggatggatggatctcggatcagcagctaggtcgccggtgagacggcgggggcagcggcgtcgcggacctcgaagacgttgcgggtcttgacgacgatgtcgtacatgtggacgagcttgaacttggagaagtcgcgggggacagagatgaggtgcacggtggagcgctggtggaactgcaggaggcacgggtcggtgaggtacctctcccacccgagctcccgcagccgccgctccagcacctcgtatgacgccaccacctccccgctcggcacgtgcaccagcaccttccgccgcccgcctccgccgccgtcccccgccgacgacgattcctcgctgccggggttctccacgcgccgcacgatgccgtccttgaacacccacacgcccgccatgtatgtatgtcagctagctgcttcaattcccaccggcgaccggccggccggagacgatcgatcgaccgtggaatggccgggatcgatcggtgacgatgatgaggccggcaagatgagggggtccgaccggccggtatatgtagcagggagctaggagtcctgcacagttgagtggcagcagctatacagccgctgtgtgaagagttactgtgcgtacgaccaaaaaaggaaacactgttcgcctctctgattagctaaggtggggcccttgcggtgtccactcgtacagaagcagtggtgcagggtggggcctcccaatcaacaggagtacaaggaaccaatcaaggtcgtcctctgcgaattttatcaactttcaactttttttatttaatgttaatgaataaatgtacccaaaacaataatagtcatcgggtactcaattacgtgtcaatacaatagctaccttagggtaagtactataatgctccatatgttgcccctaaatatgccatattggattgagtgatgaggtggaggagagaagtgaggagagagatggtgaaccacccctaaatgaagaggcaacctccacacaaatttcaagaggggtgtgggagtataagagacattggtatttgtgtagtagaggagacatattgtataggttgcctcttaatttatgagtgaatgatgtggtagatgtgatagtcacatctaccataacacttgcccttatacaatgatgaatagtaggtggcccgcgacgggctatcatacaaaattatcttttttttacgcatgatttccttcataattattttctttcaaatttgttaaatagtcgattaattgtcttaggatttaaaaaaaatcgaaccaaattttaaattttatagtttgtacaagtcaagtgtgccataacttaaccctttatagcttgcctcctcttctttccggctcaatgtgacttttattcatcatccctgtgacctctaaaaattaaatctttcccttttgtagttttagaagtgccgttaaatgctaacctacttccttacggcacacactgtgccccttctctttattggcattggaatttcaaacaacaaacatgatcatcgttacgggttcctttttagtttctagtagtcccgtcaatcattgtcaccctatacacctttatgcactactagaaaaatcatttttttcggcatgcaaaaatcatttttccaagcgggggaacggtccgcctgtatacaaacgcctcataggcggtctagtcacccgcttgcgaaaatcctctggacgaacagaaaaaaatcgccgccaccccccatgctcctacccacctccagtcgatctagggttagggttttgggagggagagagagagggagaggaaggggaggtgaggttgatgaagagttcaatgccgtccaccaccgtgtcgccgaaagggcggggcacgccggcatggccgctgctaaggaacgcgtcccagaggttgtcggcgacgtcggcagccgaggcgttggtgtggagggagtagtcggctgctgcagggccgccaccgacgctggtggtgggggatgccgccgccgccgccctctccctccttccggacggatctaggagggaggagaaccaccgccgccctcccccggcctccctccggccggatctgggaggggaggggagccacgccgggtgccgctgccgccgccccgtgcgtcgtcgttgccgccccactccgtggccgtccccgcgcctcgccgccgctgccctctcccggcctcccttcagccggatctaggagggggaaagggagccattgctgctcaccgccgcctccggccggcggccggggagaggaggagaggagaggtgtggaggggagggggaaggggagggacgcaggaaaggagtgaggggtcgagaatgaggacttagaaaaaatcagccccaaatcggctctatttatattgcaagtctattttcgcaggcgaatcacataagaggtccgcctgcaaagatagcgagcttcaccccggtttgcatttttgtaggtggctatttggctccgagtgtcatatccgcctgcgaaaataaatacccaacgtcggcgaaaatgctttttgtagtagtgatggcagcatatcttgagattgacgaagtcaccacgggcgcctcgctggaaacgggtacattgcctaccactaaaataataactacccgtaaatgtgagcacccatgtcaatctagaatttgaacgggtgtgggtgttagtatatgttacggtcacagataaatccgcaagcgcatggatgctgatgtaggacttcaccttagagtattccaagggtatcaaatcacagggaacgtgtttgtataatctaagtttaggattcatccaaggaaaacaattaaatgggagggcttaggatagagaggactttgctgggttaactatcttaattaagttattgtacaactctatcagtttcttcaggcaccggctctcccttggtttgccaagccgactccagcttgtagttctatgatgtacctgaatgtggaggaatatgaagaacggatagtgctattatcacctgccgcctacctcactttttgtgaagcacacaacaaacgaagataacctttaacctaaacaccacgtctacgttatcgattactactctagccttagtcaataattttcttctttatccagaattttagtactagagaacccaatataaatactaagcaaaaaccccacaattgtgaaaatctatcttacttgaatttaaaaataaataccaaaggagatcacgaattcttatttatataagagaagcatccatcaaggtacaagattggagattgtgccgacaactctaggactcaaatggagagggtgcctacatccggcactcctccgaaactcccccgaagagaactccgatatctagggcactcctttgtccttttggggcttcccctcactctcttcctatattctatctctaatagagggtaccctaaatatgaaagtgagttgtactctgttgacggtcgttatagaccaatttcgaccaacaatatacttaaaataaaggagaactagctatgcttgcaatgcatatttattttagaataatatatttccagttgtacttggaatattatttctttgtagagattagcacataaatggagaagaaataaaggaaaaactcactcctaagcaagctaaaggatagaggggtccaaaccgtcctagaaaccaccatagctgtcacaaccgtcatgaggacccatctgccagcccctgtacaaagtttggaggcctgctgagccagcccaggtttggtcgaaccaggggttctgccgaaccctggcagcgtcggtttagcctggccttacacgtggacgtcccgaattgcttgctgatggaggttgcggggcatttccgacattttgcatactctacaaccatcatacatgcctatgtaaggaggagctcattcacactccaatacacgctcaagcaagaagctttgatctctctctctctcaagtttagttagtgctctagtgcttagtggaatagaataggatagttctcggagtcctcgagtcttcggaagattttggtatggctctagtagcttttctatcttcttttgtaagactctcggaattaatagaatattcttctttatatacctccggtacttctctgagtactggttttactttatatttgtgccgatatagttgtatgactagcctaccagagaggtgtagtggtgtgggtttaatgttcatatgaatgattactctatattattctagaggatatagagtaatatttgataatgtaagcatgatgcttaaattattaaatatcattaattgggcatatatgctgcgggaaaatagatgtgggccactgatggtgacagctcagtacaggtattcctacacattagtatatattcccaagacaaattcctggggagggtactactccgtatttagccccggttagatggccatgataggttgtcgtacgaaactcggcaacccagggtggtctcttgaagcactaggagggcaccgttagggggtattggtcagtataactgtatactagcaaatgtaaactaagggtgagtgtatatttgaagtataggaatgattgcttttctatttcttcttccacattagtctagaattatttaagtgagagcatgtaagtctttcctctgtgtcactctacacatatgattaaagtaacccttgcatagactttgatatatataagcaatgtatataagttattagtagagttctctcttttataaatcttcccttgagattaaattaatacaataccttggaatacttccgggtgaaatgctgcaatggtatatccatgcgcttgcggatacttctataaccataaatatattagggctaattctgtgccattgttcggaattcatatttttagtaatgtcattgagaaataccaacatactccacttgagttgtgtgttctgaaatggcttgagctcctccttttatagagccatatgacggttggaaagacggtttgtgaaggtcggtgcacccataaccgtcattgaggagtcatctagggtgtccacgtagagtggcaatgagaagtagtaaggtcggtttggccgacctatgggtcccaccttccagctactcttttgactgtgaggctgactggtgggcctagggatgaaaacggagcggattcggatggataatggtcataccatatcctataccattttttttaaagcggatgcggagggggtgcgaatgacatgcagatgcggatatggagcggattattttggacgtcagattcggtgcggagtcggttcggaaacggaataacattgttggatgttaagttcgtgttcaatccatacaacaagagggcagcaaaataatgagcagcaatacgatggcaaaacaacatctaaacatgatgtcaactctataggaaaatacatccaaaacacatccataatataaacaaccaaaacataatataagtcctcgcttcactgcattgcttaaaaatataagtcaaatgccataacatcaccatcaggagtaaagacccaacaaattaacatgttcaatagtccaaaatcaagatgacagtacgttaaatctcatctctaaattaatcaaaatagacattgctactgacttaaattacctaaagcaaagctcatctctaaatttctaaatcccaaatctcatctctaaatttctaaatcccaaaattgaaaattcaaattagagaaagaagtcaaagaacacaatacttgatatggagcctgcgggaggcgacagtggctggcgacggggagtccaggaggtagaggcgctggccgctggagggtggcgacggtggatggcacacggcaggcgggaggatggggatgacggggactggatctggaggagaggtggcatcgcaggaggcgctggccgctggcgagtggcactggtcgctggatgtgctggcgctggccattagagagacggcgtcacaggaggcactggccgctggaggagaggcagcgtcgcggcactgtggcggtggcgtcgcgcgtgtgcggcgccgggatggggactggcctgtgcggcacgcgtgtacgtcaggactgtggcgcagtggtggcgccgacgcgcgtgagagtgggagaagagccggcatccggcagtgggggattaggattaggtcaacactaaacataaatgggctagatgggctggcctattaaaatgggctcaattgtgtattttttttgcctaaaacatgcggattatccgccaactcgtcattcggataatccaattaaaaaatcggataatctgcatccgctggatattgatgataccatatccgcatccgcatccatgtgataaaatctgcatccgcatccaacggatatctgaaaactcttaccatatcctcgctcccgtcggattcggagcagatcggatcggataatatccgctccgttttcacccctaggtgggcccctatgtcggtgcacgtagataggctcatttcaaatcggatttgactatgtcatgcggtcctttaattcttgtgctcgcgtatgatcggtcaggagtttatattgtcgcattgcggatataaattcatccaaaattacttgtatataaatatttattaatactcgtagaaatggttagtaataaactcttaccattaagtttggtagtatattttgtattcttttatacgagagttgatgactaaagttggtgcttaacgaccatcaacagtagattgttttttttttttaaaaaaaacctaatcaattgagtacactaacttcgcttgtcactatatatgtctatatccgactctgcgtcaaattcatgctacgccatggttttaactagtgcacatatctatacatagtgcttcctgacgtagccaaaagattcgatccgaaaatgattttcaatgattcatttcaaaattatatttttcttaattttgcattacaggtttagtattttgttcattttgttaaaaatgttatcgctgtatgcctacatctacccgcatatcaaattcatgctacgttatggtttttagttgatgcgcaattgcgcatggtaacattgtgctggctgatgtagccagaaggttcaatccaaaatgaatttggaggattcttttcaaaattattactttttacttcggcgtttcaattttaggatttttaatcatttattactatttggattaactagtggtgtacatgatgcgtgtgtcaatttcccgcggagaaaaactttactctcttgtcttttaactggtggtcatcaatgagtcgatcgtctagtttttgtttcaaccatggggtcggtttccaacgtggccatcagtatgtgacaactgacacacatatccctgctgtcacgtgctagagagcaaccaccactctgatttaattacggaaaattgcaaaaatcacctcaaatatcatcttaagtttaagattctcccaataaaataatttattgcaaatacccttcctaatttaccttaatttggtattcctccctaattggtagtcccaaatcccaatcaacaattactgttgctcatgaattttttgttgcctctttttgcatgtgttatatgactaagcccgtctcttgatggatacacattttctttctcaaagacacaacgtcatatcgagctaatcttcctcctcaaacctgccaaagaaacaagccactgtagaacctctaagtcaagcatttttatacagagttttaaatcatagatattgacaactcaacttaggtgaaaacttgtgtaactcttgacaaaaaaaggtcatctgaaatcaaagaaaatatcacacatgtaaataagaggatattataaaactatgtaaaatatagagaaaatcccctacgtacctctgaaattttaccaatcccttttatgtcccttgagttatgctcattccattatatacccccgaattttagtttgaaccctttcatattttttttgtcagttgaccgttaaattcctcaaaaagtccattttactcttggacatgaagaaacatacatatttatggagattgttcaagggtagaaatttgttgtttgagactattaaagttacgagtttttcatgcaagatattatttacaaaattatttgtagatattacataaagataatatttattaattagttattaaaaaaatttatgtagcatataaatagatttgtcttaaaaattaaatatgttgtactacaatcaacaaaaaaacatactactcatgcgatttttaataactaaaaaataaatattattcttttagtttatatcaaaaactaattttttttccttaaacaatatcttgcgttgcaaatgcataaatatgaaattcatacaaaaatttctatgctcaaataatatactcataaatttataagtttcttcatatcgggaaaatggacttattattaagaatttaccagtcaactaatggaagggggtatcgaagggattcaaactaaattttataggtatgcaaggaattttctctaaaatatattgtgcaaatccgactttgtgagtgtcagacgagtgatactcgcggaccgaatgattagagtattggggtacgttggaacgagggtctacgtagtacgacatcaagcagacaaaagacagagattatactggttcaggccccttatcaagaaatagccctagtccagacagatgataccgacgagatcgtagtcgagggattcgatgagatcccccgacgacttggctctgcgtactccggcttcgtaaactatggtgggggtgttggcgatagaattagatgtccttcacccctccctcggggtcccttttataccgtggatcatcttgacctccaagaaagatttgagcatatcagatctggtacggtacaacagaaattctatcccttccgaccaagacttgggaaatcacttgactcatagagatagttttgataatttgaggtggattcaatacgatatttatggggatgacccgtgtacgtgaaggtataccttatcaaaatattccataaatcgtaggatagaaggtatgccttatccgtaaccctgacaatagcccccgacttcaactcaaattaattcatgttgtcatctatggcctctctcgctagtgtcttgtcatgcttacttgatcgttctcggtgtggagccgagaagacgagaagctattgacaacactaagggaagtccaattgctcaaatatgaatttgaattgaagtctgaacaactgccctcaacgggcctcaggatttttcgacggcaatctctctccttccttggaatacgaaccgccaggtagtgtgcttatttaaaggggttttgggatccattttgagtccgtttgccgaaaaaattccccaatccttctagcagtctcggacccttcgtctccccaaaattccctaggttctttcgcctcactccggtgatcttgctccgatggcggacctcggccgatcaacctctgacttggcgatgcttgcgaagctctccaccgatggggctcttcctttggagcagaccatggccagagaagaaggaggtacactgcccctcccccgccctagttcgcatggtagtggtagaagatttcgttcgcagtggtttcttgccaccgccatcggaattccttttattgatcttgaacttctacggcctctcccttctgcatctcaaccccaactccgttgctttcttgagcatattcacccatctttgcgaggcctatgttggggtagtgcccttcctggacctttttcatttcttttgcgaactccggtggatggaagccagtagggtgtcgggatgctgtggttttcgcctacctgacggcatgaaggcgagatatatatctctccagtgccacacgtcccggtctaagtggcggtcgaggtagttctatccggttcttgtcgtgcccgaggaccaccctgttcgacaagactgctggaattccaaacctcctctgactccttcccttgaagccttcgtgaacgctatcggagagtcgcgagagcgggggctaaccgggtatgaagtcgttcaggactttgtcacctgacgtatccaaccgctgcaagcccgcgctcatcctgcgtttgattatgagggagctcttgacataacgcggatctcatcgtgtggtactcgttctcgcgtcgctatctctttgtcagtttttgacaacactcttgaactcgggatctgatttgtctttgtcttttctcttgcattctagttctccccgcggatgtcgtgacgcaacaggtcaaggatgtcctgatcagtcctgtctccacaactgataggccgccgacacccctctgcgacaagccggcggctgacaaagcggccaccatcaacatgagtgagaacgactttccgcatttctgcttagaagtgaaccaaagtgacctcaacccctgcaggttctgccgctgacggatgtcatcggcccccttgtcgatcactaggcctcagcctccctcgaggagaaggttgcggaggaggttgccgctatctcctcaatccccgttgtcgcagggggaagcgggaccaaaaggaaaccttgggcccgggcgagcgctcctgtgggatctcggtagaggtccagcgggtctgaggtgaggcccatcgttcttgctacgttggccttttctttttcctgggatgatgaggtgaagtcataacttgctatcttactcaggacacgagcggcctccctcctcctccgaagaggagattagtgaagttggctgccgacaagtaagtgaactccttgacctcctccattgtcatttctgtgggttcattgggggtgtttcttgatattggcaggaaagcctcggcgatctccgcttagagtggcgacgaggtggcgactagtgggactcccgctgtcgcctctccttgagcggatgccgcaccagccgttgccaagtctttcaggcccactgctatgcccgtgaccgtgccagcgtcgtcgggaccaccgaactggtttgatttgacggccgaatgccgccgccttctcgagaacacttctcgggaagtagtggcccagatggaccgcgtggccgcctgtgagactgcgtcggatgggagggtggcgtagctagagagcaaacttgatgtcgcccgcaacgaccttcaaaaaatgaaggaggtcatggctggcaacgagatgcagcgccagggcctggagaagaggatgagcaacatgcaggatcatctcttctccattggcgaccagctcctgaagagcttcaccagcttgcaccagctagcgctgccatgtggcgtggagtcttccgtctcgacacaccccgacgtgacctccttgacgtcggccctggccgagctggcgacgaagatggaggtcatcctacccaaccatgctgccaaggtgtcgaaggagatctccaatgggatccacacgggggtttgtcatgtccttgcttgtgtgaagctcactctcccagacactgatctcaaagagatcttgtctaagggggctgccgatgcctcgtgcaaggatgtgatgttcgatgtggtggatctcggagagactgccctccttatttttgaggagtaatttttccttgctttgggctccttttgtacatatacttttgtcctgtccctggttgaacagtgccctcctctacatgcctttaacttgttaatccgtagcgtatcttgctttttcgtagatgtgttgatcccgaggacgtccagcaaggtgaacgtcctaatgtcgcgatggctgactggtccttgtcagctgagatgcccactggcgacgtcgtcatggacgtggtcgtgcctgagggcatcgacacagctcgtgactcgttgagtcttggtgtagtcgggctccttcaagagaactcaggtgtgatgtcttaggacatttgctctcaagttttttatttcactttaagaggcaaattccactgaatcctcgacctttgtagatctcaaagatgccaacaccgagcgagatcgacaggtcgtcttttggaggacgaagttcgaggttgcagagctcgaacgatccgtcgtaatcgtgaagaaggaccaggccatcgagacacttcgaggttgcgaggtctggctgaactcgtacttgaagagctgctgtagcgctatgatggaaatctgccgccaactcaagatcgagcgtgcagagcctgaggagacgactgtgggctacttatcttggatgaggggtgcgtgtgcccaactagagggcgttgggcaacgaatcgacaactgcctaaaggaggagtgttgtcgtgccagccgctacgccgggggtcacattctcgcctgcatccgagatcatcatccacaaatgaacctcgggttcctgcatgatgggttccgttgttcgcagttattggcaagcaaagtcgatcagttggcgcgttccttcgctcccctggctgagaaggtcttctcatccatgaattggaaatggccgtcgtggtagacttcgttccctatagaaaaaatgtctagagaaaggtctgtaatataaatgttaagcttttgtaaatagaacggaaatctattttctaagtgtttgaacggggtatgctacgtgcgagtactactctttttgcaagctgtttttgcttgttgtcgagttgggtactctccctagcccctagccttgtcctcggaggagtctgttctcggtggggaaggctcgacgacccaaaactcgcctagttgaaaatgcgatttgcctagcccccagccgtaaagttggaaaaaatcaatttccgattatacggctcggttaatatgccaccattgagcactcttacttgaccaggttttacatggtcgtttggctcttagaatccggcaaggccttatctgctctgggcgtccccagccgagattcccgtaggtctctcggaggcttctcagaatggcgtaaggggacaataggctcgatttcaatagtaggtgttattgtggtaagggatctctgggtagaacactatttcatgaagaactcaaaatacctttgggtagctttattgatgtaactgagatacattgattctatatgtttggtgaaaaaaaaacaatgaatacctagaaaaatagggaaaccctgtattttattagtcatgattcattaacatgaatgtttacaaatacataagggctccagtaggagttcgccttttgtcttcgcgaggaatgcttaatggaaagatatcttgactggagattgcgtgcagtccgctgattcccggtgcctagcaatgaggctaccggttaattacatccataggacgagcctatgcaacacctccgattaagctgcgctttgtgatcgtcgtcttcaaaattaattgctcgccgaaggttgaggttggttcagacttaatgttgtgaatatagtgaatgtggaacgggtggctttgtttcgccaaaacccggtcacagtacactaccatcacgtcagtgtgcagagggaaatttggtgaagtgggtgacctttgcctcgtcggtgcccaatcatgtatcccggccttcatcaaatatggattttgtgtggttgcttttgcctcgtcggtgcccagcaacggtgtatccggttcccgtccattttagacgtgttaatagtacagtgacctggccttgtcggctcttggccatggtttcgtctagccttgtcggctcttggccatggtttcgtctagcctcgtcggtcatagacggatggaatgagtgaatggctgcaaccttattagcttctagccaatatgttgtctggcctcgtcggtctcggacatagcataaatattgataaatcggacatttcatctcgttgacattcggccacgatgtcaacgtgtgctttaaatctgcatgtctcacactcatgactagcgttgttttatttagcgaataattcttgtcttcaggaattgtgagaattgctcccgtccatccactagaatttggagagagaaggaattgctcccgtagatgacatgcatgaggcaatatatagtcgttctggcttgaataaaaatatgtataaatcatagttggtctgatgccaataagacttaaactcatctcaagtttatacaaataaataaccagctctaatatttgatatttataatttagacggtccaacccccaggagggttaggctcgtgttaatcgctttatttgcagcccatgttaatcgcttgacaaagatggcgtgtgcatgtgtatgcgctgctggggatacttatatatccatggctacaagttcacaacgcatccacgacatattcatcagtgctccacttactgttttaccgtctgggctgcgcaactgcacaacgctacggtgtatacactggtggagaaaccatctttggtcggtcgaccaaattccacaatagtaccggttgcaataaaaaccgggactaaagattacctttagtcccggttgaaaaggttagagctggactaaagatgactaaagatgatctttagtcccggttaaaaaacggtaggtgatgtcagaccctctaatatctttagtccatgttggtaacaccaacggggaaaaaagatcagcatgcgcggagagatcgaggcgtgcgggatcgagatacatatctcgtcctcccccctccctcccggttctatctcttcttcccctccccttctcctctcctccgatccccttcttctcgctatcttacatgcggaggatcctctcctcctccccctcttttccttctcctccccttccccctcctccctgatctgcaggcgcggcgccgccctcgcgcggcagccgggcggctagcgaccggcgcgcggcgctggccggcggaaggcggaaggcggcggctgggcggcaggcgaaagatggcggcttgttttgtttttttgagaatctgtgatgtatttgatttgtgtgtgatgtgaatatgtgatgtatttgtgatgaattttgtagaagttgtgatgtatttttttttaagattttgtgatgtatttggagatgatcgatttgagggtttggaggtgataattgatttgggattttggggacggggatggagtgaaatcaatatattaaaaacaatgaagaaaagaatagaataaaggagcaatcgggatcagcctgcctctatctttagtccaggttggtaacaccaaccgggactaaagatcgctatctttactcccgggtgatttcacccgtgagtagcgatctttagtcccagattcgtagtcccggttggaaaaccgggactaaagggggttatgaaccaggagtaaaaactacttctccaccagtgatatttgcttcctctaggagacaatgtcgggctatgcataatatttgcacagcactacggcgttgttggagatagttgtgttatatatataggataaacagcttgacggagatagttgtgttatatatataggataaacagcttgacacagcttgacaacaagatcatcttgctgtttaggactcaccgatacagatgccatcagcacctgctgctacaggtatagatcgcccatctgcgggatacacatcatctgatcatgcatcatcttcattttttatctccttcgatctcacttcgtctttctctgtgtgaatatgtgggtgcatctgtatgcgtcgctagggcatattgctgccaagtgcgcagcgcttacgccgtgtgtgctcttccttccgcgacgaggggggtcgactgcttatataggcagcggcggcggcaacgatctgcctgatctgttccgaatttccagcataattaagccaacaagatcacacgttaattctcctgataagccgacgcacagatgaaccaatccatcgacgagataaaaccaaacacacgtactggagtctggagataatcatgcgattaacatggctgatgacggtgggccccatgtgtttaatcgccactgccaatttccaaattagagataatgaccatgcatgctcacgtagcaaaacaagtaacgatcgcacttgcttatttcttttctaataatagctccaatcttttgaatcgtacatcagatttaaaatccatttgaaccattactttctattcaaattatacaacaaaacgagtccaatatcaaatatatttggacatcgtgatatttgaaatttttaggcccacatgtcatagagacacgctttgtgtatattgggctgcaaataatattttcatacaaaattaaatgcccaataatttattatatcttctatgaattttattgtacaagaattcatcaaacactatacatagaatttacgcaattgatcaatgttccaggagttggataattcgcggccatcgccatctgcgatcttgaacgcacctggtcgtaagacttgcactaccgtgtacggtccttcccacttaggcgagagtttattccgctctgtctgattttgaactcgtcggaggacgtaatcaccgatggcgagtgtgcgagctctgatgcgcttctcgtggtatcggcgtagggcctgttgatatgcagctactttaatgacaatgttcgtcacttcgcctttcatcatgttcctcgtcggaatatttctgtacttgtgtgctttgatgttgtaactccgtggggagcatggcttctgatccgtacacgagaaaaaaaaagtgtttccttgttggacgttgtcggcgtggttcgtacggtccataggactgacgggagttcctcaacccattttgtgtcataggccatgagcctgtcatacacgcgggttttgatcacttggagtacaattccgttggcacgctcgacttgtccgttgctctaaggatgggatacggaagcgaaacagatcttgattcctagttcagtacagtaatcttggaagtcgcctctagtgaattgggagctgttgtctatgaggatgcggtgagacaatccatatctgcagaatattcccttgataaattttatggcgttgtcggctttgatttctcgtgttggctctgcttcaatccacttagtgaatttgtcaattgccacaaataggaatctgtagcccccttgtcctcatgggaatggcccgagtatatcgagcccccagcatgagaatggccatgtcaaagggattgcctggagcgcttgtgctagcaacttggtgtgtttgctaaagatggcaagcttcacatcgttgcataatgtcacaggcgtcttttaaggttgttggccagaaaaagccttgtctgaaagttttgccgaacaaggtgcgtccgccggcgtgtgatccgcagatgccttcgtggatgttgagaaggagagcttttccgtcatcggatgagacgcacttgaggaggatgtcatttggggcctttttatttagatctctgccaatcatgcagtgtatcttgtcctgacaggatagcttctctgcctctgtgtcgtcatccggtagctcgtctgactctaggaatttgattagcagaatacaccagtcgtccgttgtttcaatgtttgcaacgacgtatgcgacttctgcagcccccggcctgatgtcggtgttggctgtagtactttcatcgtgtgtgtccttgacagagggttttgtcaggatatccaagaaagtttcgggctcaagcggttctcgtctagaagcgcggcatgcgaggtcatccggttcgacattgtcctttcgatagacatgtcgaacttcgatcccgtcgaatatgcgttccagctttctaacttcagcgaggtacttggctaactcagggttagagcatttgttatctttgtacttggttcgcgactagttcgaaatctcctttcatgagtaggcgcttggcaccgagtgcagctactgctcttatccatgcgagtagtccttcgtattcggccgtgttgtttgttgcccggaaattgaggtggattgcatgcttgaactggtgtcctgagggagatgtcaagatgaaaccagctcctgctccttgactgttgagcgtgctgtcgaacgccatggtccaaatttcgttatccgcttgaccggctggtctatcctctagaatagaccagtcggctacgaaatcggccaagacttgggacttgatggctgttcttggtacgaagtggacatcaaactggcttagctcgactacccatttagcaatccaaccaacgacgtctttgtttctgacaacttcccctaaagggaaagaagaaacgaccatgactttctgggcttcgaagtagtggcgtagcttccttgatgtcatgaccacgtcgtagagcagtttctgtatctgtgagtatctagttttcgcgtcgtggagggccttgctaacatagtacaccgggtgttgtactttttccctctctacgacgataaccgtactcacagaataaggcgtagcagcgatatataggaataattcttcattaatttgaggagcaatgaatacaggggggtttgacaagtagcgtttgagcgcaatgaacgcattctcggcctcttgggtccactcgaatttgtcctgcttcttgagcagggcgaagaaagtttgtcctcattctcccatccttgcgacaaaacggcttagcgaagcgatgcatcctgtcaaccgctggacctccttgagccttgtgggcgacttcatgttctcgattgccttgatcttttcggggttggcctcgattcctcgccctgagactaggaagccaagtagtttccccgatggtactctgaacgtgcagttctccgggttgagtttcatttgatatcagcgtagattgtcgaacgtttcccttaggtcgtcgattagtgaatcgcttgtcttggttttcacgacaatgtcgtctacgtaagcttcgacattttgtcccagctaattgccaagtgccccttggattccgtgcaaatatgtgttccctgcgcttatcaatctgaatggcatgttggtatagcaaaatacaccgaagggcgtgatgaacgttgttttctcctcatcctcttttgtcatgctgatctggtggtagcgggagtaagcgttaagaaagcttaacaactcacatccagccattgagtccaccaattggtctattcgagggagagggaaatggtccttgggtgtcacgcccagaaattcccgaatagaattccaagcagaatgtgcattaaaatccccgtccaggaccggccggggtacacaaacgacaatgttgacattcagatccacgtcttacaaacatcataaaagtcttacataaatgcagcgaaaaaaacgaaagacaacaggagctaagccttgtctagaactgcagcggaaacaccactccacaggcatcctcgacggcacggacgaagcctactcctcagagaaacctccatctgacacaaactcgtactctggggttgggaaaaatagagcaagactgagtactacccactgtactcagcaattcataccggaataggggtatgatgcagggaattatcaaaggagagctagagtggttcatttgcataaagagagcattaataaacagaagtttaaagaagaaaacagtcgtaataattaattaatattaatcatccactgtccaacgctataccacgttgcgacaggcccaaccatccacctatactatccaatttcaaaagactaaactagggtgagactaatcacggtgaatttggttgaccgcccataaccgcgggcacggctattcgaacagttttactctgatcagaggtgtacaactgtacccacaagacacagccccacgacacgtttccgtgcgccgacatgccaccacgacataccggaaagaggccatgacaggacccttcgcataaccccctctaaccaagcacaccacacctcaggtttcacccccactcctcgcaaggcagcgggcagtcccctctcgtgcctaggtgaatccggaagccgcataggccgtcgcagggcccatccaaactccatcacgcccacccttgcctggatgcgtcggctagaggaaagctacactacaagcccagccgttgcccacgctggcttgtggtaagtacgataagttcttccagggcatcccgcgaaccggtccttaactgccatgggtgcgaccagcaaaaccatgcacccacagcccaccatgtgatttattttagttaaccaacaccagggcgatggcactagtcccacaataccattagggccaacagtctaaacattattaggattctccccattgtgcactagttgaactaagcatggctaagcaattcctcatccaatctctagtcatgttataaccccaagctgacaaagagacatggtacaacaatagcatggctatgacaataggtaaacaccccatagtaacattataaaacaatgcaatatttgaaggaaaataatagagcatttgcaatataggatcaacatgttcaagtgacaagcatgacttgccttgctctgctgctggaggaacctcggcgactatttcgaagtacaccggagcgtcggaggaaccggaatctagcgacatacaaggcaaacattgcaaataggctataagactattgaaacagggaacaaaaccatttttaatggattctacacatttttcttgatttactgagacttgaatgggcttaaacagagctcagatgaattagttatgaattttagaagattcactgtgtttattactataaaagaaaaaccttaaatcatttactgcgcaataaatcccagggctgacgtcatcaaggggggggggaaacgcggcgccgacatgcggggcccaccggtcagcggctcgggaaagggaggaaaggggcgccggcgagagggcccactcggcagcgactcaagggggggacggttcaccgtggaccgggaccacgtgggtggtccaccgccggtccactggaccgacggcccagatcgccctcggggttgatcggacgggcggcggtgacctggctcggcttggctcaaggccggcccgccggccacggcgatggcgacggtgcgtgcgcgtgaacgcgttgccgacgacggcaaccggcggcggaggcgacggcgcaaaggcgacgcgaaggcggcggcgctaagcggcggctaggaaggagagggaggggaatagatgggagaggaagcctcaccgagggtggccggcgcggaggaagacgacggcgaacggcgacggcaagccacgagaggacgacggcaaccggcggacgggcttcggggtgccctaaggaagggagagagagattagagagagggagatgaaccacggcgaccggcattcatggccgaaggcggcggtagaggttgaactcaccggagcgcgaggggatgcgaattccggcgacgaaactcgacggggaaggggcggccggggtggagcttagtctcgcgaacccgacggtggcgacggcgcggtgaggcggcgagcctagcggcggctagcggcggccggagtaacggaaacggcggcggcgggtggttgcacggcgcgggagcgatggggagcacgagggagttcggcgagatggggaaaaagcgagagggggcgacggggaagcctaaataggggaggggagccccggacgtggtcggtaggggcgagatttcgccggccaacgtggggagtgggggaggagagagaggcaggattcgaaaatcgaatcccggccatcttgggcgcgggctcgggcgcgagagaaggggaaagtgggtgcgggagatgtggcgcacgcgcgggcgtggctgacgtggcccggagaaggcggaggtgtggacacggcggcggttgcgggcgcggcggcgccggctggaggaaggagacgggcccgacaggtggggcccacctatcggcgtcccggggagagagggaggggcggcttgggccggcccacaaggaggagggcgcgcgcggcggttggactgggccgacggcccaagaagaggaaaaggagggaaaaggaagaaaaagaaaaaaaagaaaaaggaggaaaagaatttccctgggatttaaaatattgcttgctcaattttaattggttaaaattatttctagggctctgaaaattccactaaaaatcttgttagtgaatttcgacatgtagaactcaagaaaaattccacatgtcagattcgattattatttgtattactttcttagggttttctcttgatttgcaccggcattttcttagtgtcatttataaatttaaattttaggcttgggaggagaacttcagggtgtgacattggggcacgccttgttgaggtcggtgaagtcgacacacatcctccacttcccattggctttgcgcaccattacttcgttagcgagccactttgggtggaggacttctctgataaagccagcttcgagaagtttgtcgagttcttcgtgtatcgggtgcgaatctccgcagtttttgcttaaccggcttggcgttgggtcgcaccatcaatttgtgctcaatcacctccctggaaactcccgacatgtctaacggctaccaagcgaacacgtgtgcattgtcgtggaggaaggtgatgagcgcgagttcctatttgtcatccagtatagcccttatcctgaccgtcttgtcggggttggagctagacaacgggataatcttgatggcgccgtctagttttggcgtcttgttgggcttggtcactttcttgggatgctcagttgtgatgggtgggttaggagtatgctcgaccatgtcgaggctccgcttgtcacattgtacagccaacttagcatttccttggatagtgattgtcccttttggtcctggcattttcagtacctgataagcgtagtgagatgctgccataaacttcgcgagtgcacttctcctaatgatggcattgtatgcggtgtcaaactccgcaacatcaaaggtgatttgctctgtttggaagttgttggcctgtccaaaagtaacggacaacgtgattttgctcaatggtttagatgacgattctggggtgattccatggaagggctgatctgtgggcgtcagctcgcttcgaggtatccccatcgcgtccaaggtgctggcaaagagtaggttgattgagctcccgccatcaacaaggactcttgccaccttgatgttccgaatcgtgggttcgaccacgatcggatacatgccaggtgtggtcgcgatcttggggtagtctgcctccgagaactcgattttgcgttgagatcacttcatcttggcggtagtctgtaacatcctaaaaattaacaattttctaatcctacatcatgctgattcttatgttcttattaacctttttaaacctaggaaaatataattagagagacctccaaatattaacttgcatagaatctgtctttgctatttaaaatctttcgttgtttttattctaaaattgatcttattaaaccaaggtatttactttgatttgattttgcaccttaaaccttcttttgcaaaaatccctttatctcaatttaattaaaaacacttttatgaattatggtccaagaaaccttcccatattgcccttgaaactaaaccgccgtaattccgatttcattggaattaattgttaacccatcctttgatcttaaacctatcctttgattctcgatccaaatatccaaattcctccttttgatctagccgccgatttaattcctatggtttgatttccttctcggcacaagaataatattattacaaacattgtgaataattgctcttgtgttaagaaaatagattatatccttgtcatctaaatttccttctagcctcaacaattccttgaaacccatgccatacatcttgggagctaaaaatcctatttatcttcaccatttatttcccctccttctcatttgagtgcatcaaataaattccattctatctctcaaaatattgcactcaaaccagaaactatcctttttgggaattatctttaaatatattttccttccgaaatttcctattcaaattccctccaaattcaaatcccatcctttaaatccctacaaaattataaaactctcctattcgcattgggccgaaaactcctcttttcctttcggcccagaccagcccaagccggcccagctaagcaagccgagccgctccttctttctgtgggcgccgccgccgtgcgccatgggggcgcgtggcatacgcgcgcatgcacagccgcgccgccaccgtcgcccgcagctttgcgccgccgtcgtcgtcttgccgtcgacgcgaaggaaccgccgctctacgtcagctacacctcatcccgccgacgtcagcagcagggacgaaccgccatcaccggccaatcatcgaacagagccggcgccgtgttcctcttctccacgccgccgtcgccatgccctccttctcctcctcctctgcgaaccgacatccgctgcctataaatagccggcgagatcgtcctctcctccccacatcagagctttaagctcttcttcttctctctcctcccatgtctggccatcgccgccgacggtcgatctcctccctcgtagcttctctatccttttccttgcgccactatgatggcctccctccggcaaacctatttcacccatttcccctttctctcccaccgccatctcccataccggccgaaagcgagcccttgtcgccgccgttccggcctccttccccatctccttcgctggccgaccacttccccgggtgcgcgtcgctcgggaacactaccggtcgccggcgtcgccaccttcccaccaccggagccccggcgccccctctcctcctcctctctgttcgaccgaagaggaggaggaggaagagacgggaggaagaagaaggagaaaagaaaaagaaagattgacaggtgggccccagcacagtaactttttataatttctccatttaattcaaaatccaatctttagaagcccatatctcctaaaccgtagatccgattccagtgaaacttggacctaaattcatctaaattcaaaatctacattttgatacccaattttctattttatttgaattattcaaattccatatttgatcttatatttggatttccaatttaaacttatagacacattccaaatatttccttttactcccaaatacctttagccactaaaaagccgtcggttagaactttacgccttccatggggacgtttgtggtttattatccccgacgtcgaaccgttggttgtaaagtccggtaaaaaccaaacctaaggtcgaagtgctgctcctgacaccctacgtcttgacgcgtacaacagtcagagctttactattccctcgacctccacagcacaccacacagtttgctcttgaaccttgtgtgatcctagccgctccgccgccactcacgattgtcgaagtaacatttcctacacaaacttcctattcctctaaccctcatgctgtctgttgacaccggttagagaagacaccaaatctagtcgctatgttgttcaacactagcatcgactagcacacacccaaaccctagccgatatttatcctacctcgatatcggcttaaacaaatgaaaccttagccagcctactatccagactccacaccagttataatattacctatatgccactttcctcacccccatcatatattctccatccacctagaacccgcacataaaatatagagttagccgatattttaccctactccatattcaacttccatataaccaaaccttaggtattatactacctaaacctaccactagccatataccagctgaaccagttcaattatccaatatacatcatatcccctcacctgtcaaagccttcacataaattatgagcaaccttagttgcttgatcccctctccaccttaaccttcaaccctttagaacccatacatgaaatactagcccaataatcccaatgccctataaaggagataggctatatcttaaaccctagccctcctaaccgtttatctctttcttgctattttatggcgtttattgaatttggttcttcctctcctttagtagagtctattatatttggatggcaacctgtggtatttcgagcatcggataatcaggttgtctatctcggatttatttgcattagagcaaggcaagttattattcctccccttgagcgtaattatcctatattctatatttctattctatgcattagccattcatgattttgaatgcataacttgaacatatagcaaaccagatatatgctagctttgcttagccctgcctagcataaaatataatgaacttagattggaacagtacagtagatatggttgatttccgggtggctagtattgttccaaccgatataagactgcccaaatacttgtgaagaacaaaggagtacggccacagttctagaatgcaaacagtcctagttattatgttatttaacaatgtggtacctatgtacagtggttcttgtttaagtcctcgtgcaggaggcaaacttatgccgagcaaggcaatattgtgatatttaccgaggcgcaagtaaatattggtttgagataaattatgatgtcatatatgacttatttgtaaaccctaattgcgatgacatggtgtcatacaatcagttctctctaaataccccgggaacgccagaactcctcacgctgctgataacgtacgttcagagcgtatgaggactagagttcatggaacaggtgccactattattagtaacctaatgttgggccatgactgaagctgatgattatcggcaagtcgtgggctatgggtaaagcgtacatttactgcagtaaagtgaaagtgaatctattcgaataaccatgctcatggatttgagcattgagactcatggtatttggttacaaacctaattcaagattttactaaatactgctgcattaaaaccatcacaggctttcttcttctacattctccgctttctgcaagtaaatctagccctactcaaatactgctatctcatacattcatatggaatataatagcttgctgagtacgttgtactcacccttgctttaccctaccccacctttttcagagtcattttggagttcttattgaagtcgggagttcaatcacataagttagttccctttaaacctaatccttgagtctagtatagttagatggtttaattctatagcaaaacggcagagttgggtcatcgtatagcttctgttgtaatagttagccacaaacttgtaaatgtcgtattattttatataaagaaatctcctttggagccttgtcaaaatgtatgcaatgaagatccagattgttgaacatgtatcaatctactgatccagggcttgatacggtctaaacatgtcggttaccgaatcattagttttgagacccgacatagtcgcatgtgatgtggagcagacttcacgttccgcttttttgtactccctgtttgacgtgtacgatgtagagccgccaaaaatgtgagagatgtggaggtcgtactccgggaaatcagagtcggagtcattggtggcggcttcttcagccgtttcaacaacacgaactcgcttccctctctcgatcgccagttgttttgcaagctcctttttgaagacgaaacaatcttccgtggcgtgattgttggtcttgtgtattggacaccattgcttgcgtgagtcgtcgctctgggggttggggcgcctaggtgggtccgttttctcagcggcgaggacctctcccgaggatttcagcttctcgcttttacgacttctctttttgcttgactctggtgcgtccttgttggtcgatttcttctcctcacccgccttgctatttccctccttgcgccatagggcgtcatctgcatgagcgcacatgtcgatgatctcgaacagctttcgggcagatgtgattcgtcgtgtcgccaattcctggttggtgtgtcgatctcggacgcctgatttaaatgcacgaatgacagaagcatcggtgatctcggggatcatatttctgcactcattgaagtgccgaatatagtccctcaatgattcgcctgcgttctgagttaaagcatgcaggtcatcttcgatcgtgtggcgcttgtaggttccctggaagttggcgatgaactattgccacaagtcttcccatgaggatattgagcgggatggaagatggaccagccatgagcgagcagatcccttcaacgcagccggtaggtaattcaccagcgtgttatcatctgcgtcagcgacatagaggatcgtggagtagacttggaaaaattcttctcggtttgtgcttccatcgtacttctctattgctcctggtcggaacttctcaggccatcgcacatctcggagctcgggtgtgaatgccctgcacccaccccctagggcgaaaggtggcccacgatgatgacgacatcggggaggttaatctgatgaagaggatgacgaggacaaggatgagggatcgcttggctcaggagctcggcttctcggttgatgatctcgtcctcgatctcgaccaggagcgggagattgggaattttgatctctttggttgtcgccgttccgctcctgatcttggcgattagccccccgatctcgctagttgtcattgttgacgtcgttgcggcggccactatgggcccgccggtctcgatcttcattaggggtccccctcccccccgaccgtcattctgtctctgtcgcgaaggagagcggtgacgatgtcgtcggtgggtagtgttctccccacgaagagaaggagaacgatgtcaacgtcaatgatgatcgttattgtcacgatctcttctgtctttccgccggtcgtccaagtgttcacgaagatcgcggttctcgcgacgtggcatagtaggatcccgtacctcctgaggtgattggtcaccagagaaacgtgctccattgggattttctccgtctgcgccttcggcagtcggccctccgttcccacattgttccgggtcgactgctgcctcggcaaacgcggcgttgaggttgatcatggcctcccgcagtcgcgctgcctattggtcgacgtctaggtttttcacccgatcaaaagggctctcgttcaatatcgcatctagggttcgcaactgctgagcgggtgttctcgctgctacggacgtactcaccttagtgttgccgacagcgttcacatctcgtggtgactccgaagaggattcgtagtcttccaagaggtgtagcacagatggctcatttggattagttctgacatatccaacgaaccgatctgatgttgtcgctgcatcttgttccttggcaacacatggagtttgaacgcgcggttgttggacgcgatgatgcggtggcttaagagtcctaagaaagatcctgcagcttgtgagatcgtgagatccggacctgtggattgggcagtaggtggctcctgtcagtgaagtacgctaaatcccacgttctcaacaggcgtagagttcagctttcacgtggagtatcactgggcagccctcgagagtatgcttgatgtcttatgtacgggataccaagatctcggccttagggtggttgtccttgtcggctccgattttttgtgtaaaggacaaaattcggccgcttgaggattcctcccaggtattggcgtcgtcgatgtttcgttctccacttgagtgggaggaatcgtcggcggggtgtcgtttcttagagtcgcaaccatgcctttctcgttcccgatagtgattaggccagtcgagattggcgtgacggtgtagactggaaagacaatggattcgactttagtccacaccagcggtgtcgaggtaaaggctcctcggtcgacgccggtgttagtactactaccggtaagtcctgaagtcatactggtagatccttgagcaccaggtccccctacctggcgtgccattgttgacaagtgatactcgcggaccggatgagtagagtattggggtacattggaacgagggtctatgtagtacgacatcaagcagacaaaaggcagagattatactggttcaggccccttatcaggtaacagccctagtccagtttatatgggatttacgatgatgaagacagattacaaagagagtagtcgagacagatgataccgacgagatcatagtcgagggattcgacgagatcccccgacgacttggctcagcgtactccggcttcgtaaactatggtgggtgtgtttgcgatagaattagatgtccttcacccctccctcagggtcccttttataccgtggatcatcttgacctccaagaaagatttgaggatatcggatctggtacggtacaacagaaactctatcccttccgagcaggactttggaaatcacttgactcgtagagatagttttcataatttgaggcggattccgtacttacatcttatttctcttgcctcctcctccatctctccacctcttcctcctcttcctcatgctttctaggtcagcgactaacagggaaaggcacaacagccggcgggagaggagcagcgactacggtggctcctgcttaccgagcaacgtcggcgacgacacctcgttgtgcagcggtggatggatttggagctagtcccggccactcctaacctcactcccccgtgagctcgctgaggtctcccatcgtctgcctccctgcgacctcgagctctagatccacagccgcagccgcatcattgagcttcctgatgccactgctgcccgtgccgcttgggagcttggttatatcgcccacgctgctctcttccatctccatcgtgggagcccaagattgttgatggtcatttagtacaaaatttaattgtcaactcctgcaaaaaaatatttcaaaatataatataaacttagtggtaggggtttattactaaatgtttccacgagttctggtaaaaatatgtatgcaggcgatttctgggagaaaacacactcgccatgcgacaaaatggaccaccgaccaatcatacgcaagtacaaaggattggagggcccacatgtgagttgaaatcgacttaaattgggggctaaaccatcctcaaccaacataggggtccacctgtcatgcattggagaagattggtggccatgtgaggttagcctggtttggccgaaccagggattcttccgaaccaaacttgtcgcccctggcacctcctttgcatgtggcagtctcctattgtatggtgatgacggttatgggtgaactgacctccatacctgccattccaaccatcattggcacactataaaaggaggagtttgtttcacttctcaacacacaactcaacaagtggagtacaactcacctatattttaggcacaagtttagtatgtggaattaggtagagagtgaggggaagctccggaaggagtgtcccaaatatcggagttctctctaggaagttcgggatgagtgtcggagttgtcggcattcttccactagagttctggagaagcgctggagttgtcggccttcttcttgcacgtacctcggcggatgcttcttctaatcaagtaagtattcaagatttccttatgttattaatttagtttacttaagtgagatatatactcatcgatgcgggtttgtcgctaagtttataaataagtgctctagtactatgactctggataaagaaggaagttcctatgcgatgctagagtagtaatcaatagcttaggcgtggtgtcgaagttggtgattaccttcgtttgttctgtgctctacggaaagtgaggtaggcaacaggtggtgatagctatgttcgtcctttgtatcgaccctcaacgtttgggtacatcataaagctcaaggccggactccaggctaatagactagggcagggccgatgcccgaagcatttaatagagttatacctttaacttaagttacctagttgaatccctaggaatcctctctggcctaagcctaccatttgttgttgttcttggttgaatcttgttcctagatatataaatgtgtcccttgtgattcgatacccttggaatactctaaggtcaagtgctaccgttgtatccatgtgcttgtggatctatctctgaccataacaaataccaacaaagctccaactatgccatccagagcttggcggctactgggctactgcgtccattgctcgggagagagaggagaagttgtcgtcgaagagatccatggcaggtggtgacgaagacagtgttgcgacttgtcgcgaagactgcccgcccgtccactgccgtccccagtgagcatcctgtaatagcgccatcatcatcgcggaagggttgttaggtgcagccaccaccgaattgggcctgtgacatgttctgcagtggcccagatctaaggaggggggtagtgggggagaggaggaggcgatgtagcaagagtgtggcactgagggacctacggctgtgggaggcatcaacgatgtgtgctttgttgtcggtgggcgagcgggtgcggcggtccagcaacacggcggggtgtgtgggggagaaacttgccggccgactgcaagcgggaggagtttgtcgaccaaccgcgacacacatggggaggatatcgccggctggcgacaacagcgtggtaaaggcatcactcctcactcctccatggtggcagcggtgttgggtgaaactctagcataggcttcacatcacaggtcgtggacagcagacggcgatgcagatgacgggacaacgagggaagttgtggagttgtggtcaccgtcggcggatttgtgcagctggcctcgtgggtatatggtagtggccatcatcattgcagtgttgcgtgccctcacaatcagcccatcatcgtccgcttccgcacgccaaccactctccctcctccggcgacggcgacgctagggcgacacaccgagattgaaagaggagcagggggttggtaagtgagccctacctttttttactttgtcactaacatgtgagacccacttctatcttcaattcctttcatgactgggctagcacgtgagtacttgttggaaagcttatgcagtctactttcagacggttttagtcccacatcaaaattccaactgagctgccgggaatatgcaaaacaagccacgtatatcatccagtccgaatctgatttgggttttgggccttgtaattgtatcgtgggcttagcccatggggtgtgcgccctagggcaaccctaggacgtccctatcatatttagtcagtagccgtcatcatttagagtgcggttttgcttagattattctgtctataacagtttcgctgctagatcggtttgtggaaccccaaatttgagagcttaatcattcatatgcaattgtgttgcaatctatcttgttcttacttgtgttcttcgattcgcatgcagggattagccttctcggtgaggtcaaccaggtttcggcacggttgataactagaggagacgcggtgctgcgattgcggggcttagtagcgtgttcgttcagaagccggatcaagttgtgtcgcgactccccccaaatcgactgtttatcagtacctatcggaatatcgggacctaactttcctcatcagttggtatcagatcgcggttgcccattaggtaatttatcttcccatgaccagaaaattgagttggtatcagagcgtggtttcccgttagttaatttatcttcccataaccagaaaatcgccacacaaaaatatttattcattacctagaaaatttgagccgttgcattgttctataagattttgcattgttgaattctaggttgcatcgtcgtgtcgagtgctggtttagttttagatttaatttttagttttgagtattgcatctgttcatcacttaggtctagggttcatcactcaagtctgtgagttgtacgttagttttaggtctagtttttcatctcgtcggctgttagcgggaccttgaaaaattgaatcgtctcatcgtcgggtttccgtttttgtattttggagaaatttttatccaacggttttggagttactcgatttctagagcttatgtgttgccgtactactgtgcacatgtggggagtaccgtgcgcacgcgtgaggggagtactccggatcagatcagatctatcggtgattttccgtatttttctctatctagaattgttaagtagcggatttgagatatttttataaaaatagaacctacatgatatgagcaatccatttttgaggtgatccaattttagttttgcactttgtgttttagtccctgtaatattcatatttacattcgattaatattcatatttacattcgagtccctgttcgaggtcagtggtcagttcttgtttaaaatatagtaaaaaataaagaaagaaataaaaggcagaaaggtgcaaagaaaaaaccacacctaaaaaaagaaaaaaaaaggcagaaaggtgcttaaaaaaagccacaccaaaaaagaaaaaaaatcactcatcctttgagtatgttttcatagtgcggagttgtgcattgatttatatatagtccttagtgttgtcgggtgcttgattgaggtagagttgagtctaggctaggccagcacattgactagtactttgaactattattcaactttgcattttctgattagcacaattgtgttccttgctactatatattgtgcctcccaatctccacatatatacttctggtcagcaccgctttgatccttgtaatcgcaatatcacgtccttcaaggtgtcacgaactagccaccggttgttccgtccttagcattgctagtaagacacttgtaagagcttggtaaaatgcttccatttgctagcctccactacaatccatgttctgtagttaataggaacaatactgttctgttgttctctcttttctactgacaatggtaggttaaatatcttatggacatgagataaagttggatgggagacaaaccatagctgctacatcaccttctacagatgcacatgatgaaagtaatttggtgcaacaagttctaagttctcaaatggagaaggcggagcaatggcagtaccacgaattatttgaaacaaagtttgtggtaaagggtagagcatgtcgttgttataatcgatagtgagagttgcaataactttgtgagttcagatttggttgagaaacttgagttgcctacacaaccgcatccttatccatattacatcaaatggttcaactcttgtggtaagttcaaggtaaatagaattgtgagagtaaacttttcgattggaaattaccatgatactgcaaattttgatcttgtccctatgcaagcatgttctttgttgtttggtcaaccatggatatatgataataacggtttgcataatgatattgctaatacatgcatatttagagataatggtcgaaaaatgaaattggtaccattgagttttgctgaaattttcaaagataatcttgaaggaatgaagaatggaatcgataaaattttcaaagatagttttgaaaggatgaagaatagaattgatgagattttcatagataccaggaatgatactaatattgcgatgcctttaactaaatctgagttattatgaaacaaatgtatttttgtgcctattgctttggatactaatattttgcaggcatatgagaacaaccaaggtaatgaggaggaagagaagaaagacgaagagcaaaaagacctatccatagctccatacatgcttgaggaatgtttaattgaccaagcgcctataatttctaaagatgagaaaaaaggtaatgatgatgagaaaaaaggtaatgataacggatctacaactactcaaggtttgcatagttatgatgtgccaactatgtccactacttgtgctacattagagcaacccatagtggaaagaattattgaaatacctttgtcacaaaacaatttgcttgatgtttcttgtgataaaggagttgtgcgatgcttcacttatatccatgccacaactagtgaatgaacatgttagttctatagtagagccaccatgtgttgagtttgaacatgttattttcacattgctagcgagcatgaagagtttaaattgctatcttctttaaatacttggggttattttcaatttgatgatctttgtccactaaactatttagagaagaaattatttgctagatttgaattgccatgtctttctgatgtgatttttcatgttattggcaactatgatagtaaaggaaaatataatttgcatcgagtatatatttattcaaatttgactatacctccttttcatgatgagatgtattgtctagaggaccagttcctccagttgtttaaatgagttacaggttggtttgcaagaaggggaatgttgtggttttgcgactacaaagatttcaggatccaaccatatgaccatcaagaaatgctcctccctggatgttgtgatagataacggtatgttcaatacgctccatgacaaagtgaaaccgagaactgtttccaataaagaataagaggatgatgaggacacaactagctcggatataaccatgactaccttatgtattaatcaaccaaaggtgcatatattctatattagatttacatgttatatatttgaacaaacgttgctacacaatgagtttcgtgtgtttttgtttgcagaggtacttgcttgggcgaaagaaaagagaccaattgtaaggaatgcatggatgattaaagaagttgattggggaccaaaccaagaccttctccaagtccacttccatctcaccacgtcacttttgatccatagaagacaagagatcaagttttacatgttttggattcggatttgggcctcctaacagcatcaacttcaaatggacctagccgctgatctagaaggaatttcggggcccatgaatacttgttggaaaggttatgtagtctagtttcagatggttttggtcccacatcaaaattcctaccgagctgccgggaatctgcaaaacaaacaacgtatctaatctagtccgaatctgatttgggttttgggccttgtaattgtatcatgggcttaacccatgttggtgtgcaccctagggcaaccctaagacgtccctaatcatatttagtcaatagctgtcatcgtttagagtagggttttgcttagattattctatgaagaacagtttcgctactagatcggtttgtagaaccccaaattcgagtgcttaatcattcatatgcaattgtgttgcaatctatcttgttcttgcttgtgttcttcgattcgcatacagggattagccttctcggcgaggtcaaccgggtttcgacacggttgataactagaggagacgtggtgctacgattgcggggctcagtagcgtgttcgtttagaagctcggtatcgaaagatcgggacctaacttccctcatcatggaccaagtcaacccgccacatcaacaaaaattacttcccaaatcactgaataatgattcgattttgcaccggctttttatgttgaggaggtgttatacctgattttggggttgaggaaacgatttgaccaagggcaaaagacgagagacgcaaaatagacttattactcgtaggggatgatgagcacgcacgctgggcacctattggccctagcattccgacgaatgaacggaagtatttgattggcagtcgagatctccatttaaaataaacatcttaattactcgtgttcaaagcttaatgggagaatgctaccaacaggtctaccgatgctacgaatctttatcgggccctccaacaactatgtctactactgttctctctaatacatatatgtatcaattaataaaatattttttctcttaaactacttatccgaactacgatccgattaaaccaatgtatttgttataattaattctttataatatctatgattatattctaataaaaaaatatgttttataccattaatgtttcatgaactataacgatatgttttaatatatgttttcaccatgttttacaaaacttaaacaatcactactcttactctctgcttccatactacctttttttctccattccattcatgtaccatgtatatagtgatcttcaaaataatatttcttcttctaaactccttatccgatctatgatccgatcacactgttatatttgttacaattaaatcttaaaaatgtatcatatagttatattccaatgaaataaaaaaatatgtttcaaactgttaaaacgtatgtgatagcgacatgttttagtgttttcatcacgtttcacaaattttttaaaatattttaattgctgattttttttcactatttataatctaatgcttaactcgttggtaaagtgaaacacacctgctagcttttatttaaggaatcggacgatcgatttgtggttttctcttgaacataatgtgcagtatatgcacatcgatcagccgtatacatgcaaatatttgcattagccataagccattacattaattagtagcagtacaaaactcggttcgtatgaaacaaccgatcgatcgaactcgacccaatttcacgtacttgatcgaatacaaattaaactgaaaattagcagtacaggtcaaaggtgatggtatactagactggtaatgcgccgtacgtgtcgtcacacattacgcctagccgtgcgtggttattgcgctatccaattccaaacttgtacgtggacggacgagcgcgtcgatcggcgtcgaccttgccaccggcttacttagggacatcggttgcctttggctccgtggcgggcttggccgcggcttcgtcggcgtcgctggacttcggcttgacctttcccttgccgcccttggcgcgccggccggggccgccgctgccaccgagcgcgggcggcaggatggcctcgctgacctccatgatggagatggcgtaggggcgcgcggcgacgaccttgacgagcttggcgacgcaggccgcgccgggggcgcccaggtacatctgcccgtcgctggccttggtgtagttgacgacgccgagcttcttgtcggtgttggacagcagcgtggggagcatggcggtgcggtccttcatctcgcccagctggatggggtcgaagtacttgaggaggacgtggttggccatggccatccgctgcttgtcggcggggagcgacgtgatcggcttcatggccttgtcttggaggaccagcagcgacgccgacttgagccggttcgtctcctccgcgaccttcgtctgcgtcagcaacttcaggaacgacccgtactgggacttgtcggcgagcatctggttcacgtcgaaggcgcccagcgccgccggcgaggccgcggcgaggaggaggaggacggggagcagcgtcatcttggaagaagccatatttctggtgctaattaaattagcctgtggttgcgagctctctgcaatggcgatcgatcgtgcgtggatgcttataaaggccgcgatggctgctatttctgggaggaggtcggggtcgtcctctcctccaaatgtgctcctgcgtacgtacgccgcgcgccctggatgccgtcgtcgctgctctgcatgcggctggttccccgcggtcttcgctcgcctccatttttaatactccctccttctccttccctaattgtttgacaccattgacttttttaaaaaacatgtttgactgttcgtcttattcaaaaacttttatgaaatatttaaaactatatgtatacatgaaagtatatttaacaataaatcaaatgatacgaaaagaattaataattacttaattttttttaataagacgaacggccaaacatttttaaaaaaagtaacggcgtcaaatattttgggatggagggagtagaagccaacccatttcatggaaacggaaaaagggaaataaattcgctacaatttccttttttcttgtgcgaggaaatcaaactcaaacaagttcgatcctcagtgttgcactatcactaaatgtcctgctcgaacatccgaagcgagttactgccccgaggcacaccgtcacagtgcccggtatgtacattcaaaaatacaaattaaccttcaagtgtatccaacaaaacaaaaggtagtttttttttcgaggaaaagtcttttcaccaactgcggatggagattcacaaatacggagtgtcagagttacggatatcacatacctaatagtagttgactaaatctcggcaggacccaccacataccatgtcttatacggaaacaaccttcggagataagaggagttccgcataaggaaggatgaatagagttctacatggaaacgataagtactactcgaattgtatccatattggtttccctagttctacttggagaaggggacacctacgggtataaatacaaggccccctagaaggagaggggacacagaacaatagatcaagacacaagatcaacatacaagccaacatatgacaagacaagacgccggatatcgacttcaaaaataagcatggctagtcccctacggtgtcttcggatactgtcaggaaagacatagcattgtctctgatctcgccgggcacggattcgaggaggaagactaccctattgtcgactagtgatgatacttcaagccgccaagtcgacaacagttagataggctaccccaaatattgtactggtgtgatcatggtgaataagagcaacgaccggcttcggccaaaaggagtagggttattacctgacaatttaggggcccgaacttgtataaaaatcctcgtctccgtctcttttacctaagtctcgcatatattctagtaccaacaatccccatactgtccaaataccgtagtcgcgacatcaaacgtcgacacggagtaggattcaataattgtgggatctttatctagcgttggtgcatattaatttgtgcttgcttcatgttatttgggtgtgcttttattgacttggtgtgtgctcgtcattcgtcatcgaatggatttttgtaataattgactgtaactcgctgagcaaagatcaaaattttatctcattatctgaataaaaatcccatcccacagctgttgtacgtccacttataccagcctcatcctttcctcctccttcccatgtgtaattatgcataaaggaagatatcttaggtttattcaatagattagaaagtggataatagttctcttaagggaacggctatgaaaaccgattttcacgtactgtttgggatcacctacaaaataaatgatataaaatttggaaatgatgacctattattccaggaaaaataacaaacgatatatcttgattcgagaagttcaatttgaggggtctttatcttccgacaaatattctttattgtattcattccatttcatttttgctccatatctatatttgataatattgtatttctttttcgtatccggggtttccaattccaattccgaaaagtgaatatggtagagcttgtttcttttcgatccgttttcatccctaggtctgggtaaaaagaaattacccattaatttgagttttgcgtaggggagattatacttattattacccacctaactcggacccataattttaaaactcgcatccacactataaaaacttgtcaaatttggttgaatttgtttagaaatggtttattgcataaaaaataactttgtgtaattttgagctatttctatatgtgggtccacatgtaggttaccaataccaattggacagtataacaccaatcgattaggtaatacccacacccattaagtatgggcaagttaaatatgagatgggtatggataaaattgtgaacccatacccctcctccccaggtgactggtgaccctagagcgttttggcttgacagcattggccgcagtaaagcaactactcatcagctcttacctgttcgggggaagttatttgcaactttaggggataagatagcatgctctctctatttgcaactttaggttgtttagtagagattaagattgaggagaaattcgatgttttatgcgtggagatgaaatatatcttttgcatatttctatgattatttttaggagtaccaatatagcatttgtcagtttttttgtgaaaagctttcaaatataattaaagtgtaactatacttaatgtaatttatatatgtatatgaaataaaacgagctggtgcagtggtaccattcatctacagctcgagtgttcgatattccccatgcccattcatgtacatgaattttcttctgcctatcaccaatctcaaagcaaattcgatggttaatgatttgaaaactgtcgcaagtattttacagtttcgtatcgtttttcacaatatatacttatatttcactagtgatcgtctataacattataaccttgttttttcatcccaccgtgagacaagaaaaggagggggtacagtccccaccgtattatatatccaaaagataaaactcaaccaagttatatttggtttgcggccaaactcaactgagcaaaagaaattagcaattctaatttttaccatatctttatctttacctacttaaaatatccgtaatgtttccgtcgtttgtgtccaaatagcacaaggtttacgctttccaacgcaatgacctggcccgcgtgagtccaattgcgtgagtccaattgcttcatgatgcttgtgtcgaccttgcttcgtgatacttgtgtcgaccatcctcattgacgcgtggctctgcctagcaccagatcgattggatagctcctggcctcccgcgtgcgtccatagttcatgatcgattgcatccaagcccatgttccagatcgctcgcatacaccaatgttgcatgctcatctcacggagccaataaccccattcggggcatttgaatacagtgaattttggttctattcgtgaaatactgtgcatttgaggtcagtgaatccctgttagtggattcgattcatgaagttggggcatttgaggtcaaagaaatacggtgaagttattggatgcctagatacttttgcatatggtttggtaatacttgcttattattgcaaaaacctaatattttgtgtcgcatgttttttttctgattatgtaggccttctctaacaagtttgtgtagcttcggtaagagcggcttgtgattactactttgttagtatttcagttcattcttacactgatgagtcatgagtcctttcaatcaagggcacatttgttttacttccataagaagatcgaatctccacgatcaatacagctctatatgtatgagttgctattgactatatactagagtcaaacacgcactttgcacgctacaccaatggcctccgaaaaggagagtaagattattttggtaaatagagtgaagaaagatgcattatgacataagagtaccaattctataatattcaatccaatgttaatagaaaataaaatctcaatttaaaatatagtatgtccagtccaaacttctgtaaacatctatgactaattggacaacagggatagtacagcaggaatttcgacaggatgaataatgcaaaaaaaaaaaagacaggataaatagcacaaaaatttacatagaaatttggcctttcatggatccattttttatgttgataatagcataaaagcagtccactcaagatggagttaaacgccatagatgcaattgtaaattgagatttaattttctaccaagtttgtggtttagctaaagcactaaagcacaaacttaccctttttgaaaataagcaatagtatgaaaaagcttacagctgctttcacgaatttatactgtaaatctggttctatgactaattaagcatactctacaaacaaaagcacgacgattataaaacagaatagtacagtaggaatattcaaaaatgaaatttcagctttgcatggcagcaacctcaccctccagctctgaagttttttttttttttttgcgatagtccagctctgaagctttgtgggaggaacgaaagaatatttcattatatcagttgtttttggagagcttggccatccctgggcaataagaacttggttgctcgtttctgaggagctgaaatgaagtgaagcagagacatgccaattggccaagtgagatcccctccaatgtgaagcagatacatgacaactggccaattagccaagtgagatccccactaatgtgaagtagagacatgccaactggtcaagtaagatcccctccaattattcaggttgtactttcaattcttttttagtagtaaagggcacatgaaagaaaaaaaacgtaaagaagatcatctcttcaatgatggtattataaatagtgaaggaatgctacattacttaccaaagccattcataattagatagcttacatataatccagtttttgtttaggcttaagaatattattaaaaaaatgccatactaacgaaaatagtttaacatttagcctataaaacataatctgatagttttcttctgttacgctggtaacattttattacaagataaaaaagaacattttataacaaataaatcctacaatctcagcaataaatactatattttgtggcataaatttgcttctagtcaagataacagtcacggatttgacttaacatcttgcacaatatcacaaaaaaatattatattgaccaatagaaccaaacttgtcacttgcaattttcactaatgaaaatctacaattctgagcaatgaaaaatccaagcaactttaacacttgaaccacatcaataaaaaaatgatatagaaactttgaaacccacctcggcaagaccaccacaccactttttataactttgcatgatcaaattgtggacaaatgcaatacaatacattattcattgccacatgcaagataaatatgggggtggccagtagcatctagaaaacaaagtaacagatctcatttttatatgggttaattggatccatgccactacaaatacgccattttagataaatgttactactatttacgatatcggctacatgctactggaatttggggaaattagaaccgtgccactccatcgcgttttccgtcaaaaatcaccgttagcctcaactgcacgtggggaagaaacaagagggaggatggaggaactatctttgtctacccctcttattttcaaagaagtgttgttattgctatcagtcagtctaacagccatcatgtccatttaacaaaatataaaacaacccagatatgaatcgctttgtaaattcaactcaagcagattaacaaatccaaattccaactgaacttgcagataaggaatgagcaagtaataataagaagaaaaaattggtttaaaggcatgttgcccatatttagagggaaaaaagtgaaaatgtcttctagctctagtcattcctctccgaccaactactgtaaatagtgcataataaaaagataaatccaatgaaatatattacttgtgcaacccaacatcaggatggcctcaattcattcatcgcgccttgtatatatcatctaattcattcatatccctcaataattaacatccatcattcaaaaaaaaaacacccatgtaaaaaaatctattgcactcctagcactgcaatcagcatacatgtgtactgcattttgttctattgcactcctagcatgtccactttgttagctgtgtgcttcaaaatcttaggtgctggcattttcagaaaataaacatgaagcatcattgccatgtgtagatataagaaaaacaagggcaacagatgattaaatatagttgtggtttgcacagtattaaggatttaaggtggggatttctaccagatcatttgaagtgtgcctctgaatttgctgagtttgttgcctagttaaaacaacaacaattaggcatcacattcataagttgttccactttgtttatcatatacttcaaaccctcctataagatttacagcaaatgaaagcacacactatacaacaataatttgcttctgtagaacagaaatagcatatttcagaaaaatataggtattatagttccagctaattaagatgagttaatcaggatgttgatggtactaataatgacatacctgataatgtctaagttgattctcaaatgttttcatgaccaaaggctgacagtgttgtattggcatccaaagttcttactcttagttttgtaccatcctgaggcatttcaatttcttgccagttatttatctgcacaaaattggaaagcataaaagaaaatgcagacagagagcatcaaatagtacactcaattatcacataacctcatctactcacagaattagttccgcattcagcctataaaagctcgccctatgttttttcccctattgaggtagtaaaatgattattacaaatgaaattttcatcattgtaagaagatcctgtggtaatttctatttatcccttggttgtaggccaattgagcaaaagaaggcataggataaaaagttttgcaacatgaaaaagggatcagtatagctgatcagcaactgtttggggttgaacaaccctaccttccttcccaaagaataagaatctccaaaggatcagcaattgtcttctaattatatcctctggccaacaataagaatctccgaaggatagaatacttttcaagcataaacattcatgattagtgttcaactgttcagtagccaccaaatcccagtgtactactgaatccaaattcagtttccttttaaataaacagatgatatctatgtgcatgaaggtaatcaagaggtctgatggcaaacaaaacagcaacatctactgctagcctatctaaactacaggagaacatattgccaaatactttttgtacataaacaattcaagtcgagtattcacctgtttggtagtcaccgaatccaaattcagttttctttttaaataaacagataatatctatgtgcaccaaggtaatcaagatgactgatggcaaacaaaaccagcagcatctactggtatgcaattgccgctatgctgtggagcttcattggtggctcttgtgtgagaggcaaagcaactgtagatggtcgaccacctaaaagaatgaagcaaacaaatttatggatctcagtaactaaagatgcataattaaagaccaaatctaaggaatgcaataaatcagtaaaagaggttgaaacaaaacagaaagccaacctcttatacctcttaaacttttatcctgaaagataaaagaaatttgagttacttgccaagaacctgcacaaattcagaaatacatgatagtgagagcctggaaggctgcaacacacatacaaagggagaaagagagagcatgaaaaaaaaggggaaaggaatgataagaggcaagcaggcagccagcccacacatcgtctgtgccactgcccactggtcaccgtcacatatgagaacaatctattgccggcggcaacgatagcaagggactcagatacacatgaatcgtggacggctttggatgtggagagggacatgcatggagacaaacctttttggctgcgtacaatgctattcttgcttgatgccgtcgccggccagagcggcttcaagcttccgtgcagcaccgtattactcatcttgccaaatccagcacagtgttggaaagaagaaagatgagggtggggagcagagcatttccccatggagctcaccgccgtactgtcgatgagcctcctgtgctagccctaccctcgcctccgggtgaccggatccgccggcaaggaggtcgtggctaccgaatccggcgggcatggcctaccctccgccggaactggccccgcggtggcaaggggaaggtgcgacgatttggctaagtgtgagaaaagtggtcggcggcggcggcacgggggggtgagggcgcgaggaggcggcggcggtgtggtctaggggagagcgagcgagaagagaggtgcgagggaacggtggcggctaggttttcgtggggtggagggctgggatagggttgcaagttttgcggaaaaaacccttactttccatgttttcgagcgcggtcttgttttctgatttttcgcttctttagtcagaatatttcgttttgtagaggtcctgcacgtaacaacgtagaacatagaaactgtaggacaggaacctaaaacaaattatcaattagtttaagggtttttttgcaaaataaccagtgtcgacgcggccgcacctgcgctcgtgaaatcccccaagattccagcgccgatgacgcgtcggctcgcgcaagtggccacgccagctcaaaattctctagaggagcaattcccctctgtacaaaaaaaacactggtttttgtgtttaaagtttgattgttcgttttatttaaaaaaattatgaaaaaaataaaaagacaagtcacacataaaatattaatcatattttatcatctaacaataataaaaatactaattataaaaattttcatataagacggacagtcaaacgttggacacggaaatctagggtttatcttttttttgggatggagggagtatgttcgaagtattctaatatgagggcagtattatgggttgcaaaataggttttatcaaaatatatattgcagaagctttgtggcttaagtgatgagattttctttgttaatgaacaaggcaaaagactgtgtaaattgcagaatagctagaaaatgtagagtgagagcaaagtgtgataaatgcacggtggaagaaaatggaaagtatctacatatacaattactaaaattgaattcacctgttgcaacacatcaacatctttgctagtatagtaaagttgcaacacacgaacatcattgctagtagtaaagtgaaaaaattggcaaggtttacaacggcaaacaaccaaacgagcccggccttccgcgaagcccacacgacgcacggcccaactgcgaacgctcaccaagaaggcctccctcgttcttcgccgacgcaaaccccccgcttctccgtcatccccgaaaaatcaaaccctagggtttacgggggggcccggcaatggccgacgccggtgagctggagggcttccggcgcctgtccggcctcgccttcgacgagctctcccggcgggacctctcctccgcctccggcccgccacccgccgacctccccacgctcctccgcctctgcctcctgtcgctgcctctctccgccgacgcggagctggcgttacgccgctgcacccgcctgctcgcctccctccgcggcatcctctgccgcgacctcgacccctcactgctccccgccctcgaggtacgcgctccgttcgcttcgtcaccattgggttgttttttttgctctcaattccggaatcagaatgtgatgctcaggggacaactgaaaatttccccttaccggcgtaaataactttttcccctatgaatagttaggtgagagctcatccgtgacaacggatagagaggtatttttgttaatttcttgtttggtttatatgttgtaggtgttcctggacaatcttgtatctagcaaccaactgatgacttgctttactgcggccaatgctgttatgccgagacgctcaagaatcacctctctgggttcggtgtgcagtggtggcaaccttttcgtcatggagctcatgtcgcatcacttcatttcatctgtgcaagacgaggaggggtttttgagcgcactatcatggtcagcgaaggctaagttggaagttccagaaattggcctttcaggagctctttccctgctccacaagagctgcttgctctctattccgcctgctgtccaggctcatttcttactgctggcgtgcagatgtgctgacaatggggatctgaacatgaatttgctggcgttcgagcatgccatggatgtctatttgagttacttacctgcattaggtgttttcagaagaactagtggtgtaaaaaggccgttgggttgttccatgaaaagaagacctttgagctcttgtttacaggctgcaactcatcagaagctagcctgtgatatcaataggctggttttgttttgcaacttgcactccaatgacgacttgcccatcaatgagagtgatatagtccgtttcattgaagagaaccagcaagtacttcatgaacaatctaggcaggacactattactgctgtgaaaagcatagtatcaaatgtccttcttttggcaaagcaggaagagatggatagattatatcctaatgtttcagaggagattatctgccttgctgcagcacttaggctaatgggctcctcttttatacgaattatgcattgcattaggcaaatgacagtgggagatggctgccagaccacacattgtttagaaccttgcaaggtgtttaacatcgtatcagaaaccatcagcttacttgggcactatgaacctaatgagcttcagagaaatgacttatttgataccattggtaagcctggggacggacaacagggagcagtgctaatgctatctcattttgctaccttatcagttcattgtttaagaatgaggtttaactttatgtggaaaggttgcattttcatgatgatgatggccaatctttgtgctactgaaatgtatcattttcttattgatggttcaaaagcatctaaagttcgttgtgctgatcaagatggtagtttgaaggtagtactcttttgtaccgattcggatattttttttatctctgattcttgttagcatgtcttttatttctgtcattttatttgattctaagaccatatgcatgtaggcctctgttccgagaaaatcttctacagtgatagcattacggtttcagaacacacagcaagtttatattcaagataagcttggccctggctttggtgaggtctgcaggtaagctccaaaaagtttaggagtagctcttggaggtgtacaatgaagaagatagtcttagttggtactttatatggtaatggtgaggttgatgtagaggagcttgatcttaacagttcttagcatttgttgttattaagtcttaaagtttcttcatacttctttgagcagaaatcgacctttagggcaagcatggtttttcttttgtaggttgcattgttaattggtttttgtgtcattgaaaatggtacatatgcacatgaacacactaaggagtgtaatttgaaagtaccatcttgctaatgctctaatgtactgctttgtttttgttagggatgtctattttaaatccctgaacttccacaaaagtctaaagtttgtttctaaactttcaaactggatattaatcaccccttaacttatcaaaccatctacttttgggattcttccttctcttcctcctcattcttcctgctgaagcagtgaagcaacaactctggacgaatcaccggcatgcccctgcctgcgctggcatcgacctcacctgtccttgtgcctcacccaccattgctgctgccaactcgcttagcttcatcgcacatgcatttggctagggcttcgctgaggaccgagctgcacacaggaggcttccttccgatctggtgggtatctcgtgcatgtggagcaaagacccatttctaagcagcatgagtcaaacgatgcaatcaattaatcaagctacgtgtttaattaatacccatgaaatattgctagttggcaccagtgagcttgggcagattttgtgtcgctgatgctatttgctactagatcaatgcctcacccacagccgccaggctgcggcctctgcacttggtcaactttactcgctgctacttgaccactgcctgcctgcctctgcttccttgcttgcccttggccaacctttttttgtcgggatgaccgaaggaggtcatccaatgtcattaagatagaggaaaaaaaaggttacaagaaggtttttcatcgacagcaagctattgaggaaggatgtgcacaaagcgcacgccccgacaccacatgccaactgcacaaacacaagctacagagaggggagccaaacaccgaaccggcaaccgccatgcgaggccggtcaccgctaggcttacaacaacaccacagaacggaaactcaaaaaagacaacgccttcatgaaggtagcgacatcaaaagatgccgtcgttgtccgtccaaaagaccggacaaggttttcaactagagatcctcgttgagggaggagggtacctcgacaatgcccccaagaaggttaccgcgcccgaaggcgtagccgctgccggtcaccttagcctgtaggctgtagctgaggaagaagagcaaaatgcagggatagcgaatgacatgtagagtccactaatttattatttttctttgctaactgagatgccacatattaaaaccagtctggttttggttgaaatacgtaaaccaaacagtttgaaaagttcggggatgaaagtgtctggttttgaagttgatggacgatttttagacttatgcaaaaatccaggggtgtaaaaaagacatttccctttttcttaatttagaagcccttttttcccttcagaaatactagttttctgttttattttgtgtagatctgttattcttgtcactttgaactcatatttgttcgtccaatatctgaaaagcttatatttaacctattgcagttccgatagtcttcagaggtgtacatctagctatggaagggataatgttagaaccattctcaaaggacttacaggacgtggggaggattcttcagatctatacgattttattgaatgcaatccaagtttggattattcaaattggtggacacaacggaagaagtttaaaaagtttaaggaccacaaatggataagaagcaagagacattctatgagtagactgagaacctcaaaggtatggttaagataaaagtgcgccaatgtacatcaccgcccctgatgttacccattcagtgggtcttttgtatatagttccagtgggtggttcagccgctagatctcatgggcgttgggcagcccagtaccggtggaggtaacattatccctatcttcccctcttactcagtactgtagctcagttggtcagagtttattggataggactaggatgggtccttccctctctatataaggagagattgtattgtggtttggattaagcaatgaaaatcgattagtctaatctctactccctcaatgttcttctccctgttctaaatttatatcccttctccagtagctgacgctgcctggatatcttcttggcggtggtgttttgaatgaagaaacattagattgaaggtgatagtgaaactttgataagtcacaagaatcttatagcattagaaatatcataactgagattgactggttccaggaagtccactcgaatgcgggatatgttaatgttctgtttgtacgtgtgcattatttgtgttactttataatagtagaatcactagcatgtactgtatcaagtatcatgtctgttacttttgtatctcggcatatgttctccaacaccctttgctccttgaattttcatgtaacttttgtatcttaacatatgttctctaacaccctttactccttgtttaatttgttcgtacttccaccaccgactatgtttggtctctcttgtgaaacttacatgtagtctgctcgttctttctaattatgcgctcaaacgttctgaacgtcggcactattatgctgatttttttttaaaaaaagaaaacgaatagtaaatcaaaggtgaatacatgaaaactgtcgaatatttttgtgtatattttattattttgtaaatttgtgtagtctagtttgcaaaataggatggacgctgttggtcgggtattcagatgtaaatgaagggcaattgaagggtatcccgatgtatatccaaaacttttgataagaaaatagatgtataaataaatcgtataatataatatgtatgtatatatatgagaaaagaagaaataaataggccacattaaaccctagaaacaagaagcctatcgttctggtctcctgggcctcactccccgcttcactcctctgatgtgctggccagccgcgtcaaccgatcagcacaggtacagagacccgtccccaagccacggccgccgcaaccacgccacgcaccagtcggtggtggtttggattgtcagctatactagttgatacctgtaccggaaaaagtatactcttgactctctcaactattgtccgagtactctaagtatcaaaaccagtacaaacaatgtccctcggtggttttgaaggtggttttggtctacgtggcggtcttgaccaagtctttgttctacgtgacgcttacgtggtattagaaaaaaaacaaaaataaaagaatatgtaggacccatatgtcattcacaaaaaaaaataatattgtggacccataacgcatgattgcaaatgtggcttttgcagggcattgcctcggaggcaaggttggtatctgctacggctgcaagcccgcaacgccgatgacctgccggcgccggacaaggtggtgcagctcatccagcagcagtcgctcaagtacgcgcgcatctacgacaccaacatcgacgtcatcaaggccttcgccaacaccggcgtcgagctcatggtcggcgtccccaactccgacctcctccccttcgcgccgttttcaatgagaacaagaaaccggaaattgaatctgagaggaactgggggctgttcttccctgaccaaagctctatatacagtataggttcttgagcttcacgaagctcggcatcacgccggcgaacttgttgccgtagaggagtatctcagccaaggcgctgcatttggtcaggttgtccacgaactcccagccgccgccggcgtcgatcgccgtgagcttgttgttcgacagctccagcgacagcgcgcagagcgtgccgatctcggcgggcacctgcccggcgaagctgttatttgcgaggttgagagccaccagcgccgtggcgttcgacagcgacgccgggatagggtgggcagaataaaaccgaactgaagaaccaaaccgaaaagaccggacgaaaaaaccgagaccgagaaattcggtctcaaccattaagaccgaaatttgttcggttaattcggtcagggtctcaattaaccgaattgaccgaaataaccgaattgggtccaatagatcttgttggcccaataagcccactaatttagaagaaaccctagaggcaaaccgatccccatccatttcacatgtgcgccgccgtccccatctgaccatccccatcctcctgtgcgccgtccccatccccatccccatcctcctttgcaccttcgcgccgcctcttgaccgcatcagcgtgcgcctctcgcctccgcctccatcgccgcccgtgcgccgcctccaaccagcctacctccgcggctccgcctccatcgccatgcgccgactccagccgggccgcctccacctccagccggcgcgcctccacttccatcgccgtatgccgcctccagccgacccgcctccgtctccatcgccgtgcgccgcatccagccagccggctgcatcccggcctcggtggtggtcctggtggaagatgacagccatggccatgagaagctgatttcttttctaaatcgtgttcgatttgcttcttttcttgtctaaatcgtgcttgatttgatggtgcaccaatttgtagtgtgtcatctgcgatctaattgtttgattcatcgatcttgcactgattatttgatttgtgttttattgttcaaacatatgttacggttagttcggtctgagaccgaaccgaactaaccgaagaccgatttgttcggtcttgagttttgttggagaccgatcggtcttgagattttgaagaccgaattttcaaaaagaccgagaaaccgaaccgaatttctctgttagaccgaatgcccatccatagggattgggccggcgaggaggttgccgccgaggaagaggtatggaggttcggcgtgcgcgcgcccgcgtagcccgggagctcgccgcttcgtgcttccttttttttgcggggtcgtgcttcgtgcttcgaggaggagctgccgctcccaaccgccaccgctgctccccaccaccgcttcccacagctgccgccgccgccgccgccgccgccgccgcttcccacacagccgccaccgctccccgccgccgtcgtcgccattccccactgccgtccccgctgccgctccagccaaggtgaagagaaagggggggatataataaggggagagggagcatgacatgtagatcccacaatattttttttttgtgtgaatgatatatgggtcctacatattttttttttatttttgtttttattctaatgccacgtaagcgccacgtaggataaagacttggtcaagaccgccacataggtgtcacgtcagccaaaaccacctccaaaaccaccgagaggcattgtttgcactggttttgatagttcgaggagtcgatatacctagttttgtggttggaggacatgaatgatacttgagcaatatttgagggattctaaggatactttttcctacctgtacctatggatggcaataaggcccgatggcctggcccagcccaagcatggcacagcctgacagttggatcgtgccttggccaatgccttggcacggtaggccggcacggcataaacgaagaaaaatagtagaggaatccaaaataggcttaatcaaccatataaggaatggcccaaagagaaggggaatataaaatagacttattttctagccatatggacacagcccaaagagttgagggaggaaaaaatagacttattatgtggaaaagcacgataggctgtcgtgcctttggaccggcccggcacgacccgagtcttattgggtcgcatctgggccatgtatgcagcccgtgggctggcacgccacggtttgacgtgtaggtcagactgttccagcctgactgacctcggctaggcacggccgtgccgggccggacagcccatttggccatctatgcctgtacgttaccgtaagattttcttgattgaactggacaactaagacatatgatgtgttaaatatattggttttattttgttaaaaaatacgtaaggattttgggactatttctgcccgttgtcctcaacatccataggtatacacgatttttgttcaagctaaacggactgagaagggaaactttagggttcggttgtgtaggataagagtcgatttcaagcgcgatacgatgtatgtaaggattccaggactattttcgtccgttgtcctcaacatccatagatgtatgtaaggattccaggactattttcgtctgttgtcctcaacatccataggtatacacgatttttgttcaagcaaaaagaaaggaaactttagggttcggttgtgtaggataagactcgatttcaagcgcgatacgatgcggttttgctccgattcttgagaaaacggaaagtgggggagataagaatcgaaacccctcaatcaattttggattacctccaaggatgtggccggatttcatggaggagggagcttcaggcgtcctccgagagccgcaggagacaggcgagaggtaggtgacgacactgtagcgctgggacccacgcgatagtgagaggagtaggggaggacgattagacatgttgttgttgatgagcctgatgcgcgctttgtgggccggaagtggagaggaggagaaggagggaggggctaaggaaagaaatggtctcaaaatggcccagggagaaaggagggtttttatttagatttttatttaaataaatatgaaaatgatgtttgtattattaaaattagaaatgcagatctgaaaattctgaaaaactttcacatagtgtaattaatcatgtagaatttaataaaaattaaatccagtcatattttatttcccacatttacattgattttcatcagcctttcttttcttcaacatcgtatacatgtgtaattgtaattttatattttaattaattacataatgtaaatctttcttaattttttcttaaatctctcgtgttttgttacataatgcaacgcacatgcactttttctagtgtttatatgatagaaaacttgtggtagaaaaatgttttttttagttcatatttctaagatttgtaagatttgtagaagtaatgcaagggataataattacgtagtccaatatgagaactaatataggacaatagttatagcactggaaaaataaactggcagatattatagcccataatacaatggagaactaatgaataagtattgtttaattcaagttcctctatttgaaaaacacaaattcaaatcagactgaataaagagggaaagataggattggaacgatatgttgaaatattgtgaaaataatgtgaccatgatttgatatacttgtgtgtagagctcttgaatgtaattaactatagattggcatgtttgtatattaagattatttaattcaagttcctctatttaaaaaccacaaattcaaatcaaactgaataaagaggaagaaaaataggatttgaagaatataagttgaaatattatgaaaataatgtgagagggatttgatatagttgcacgtggagctcttgaatataataaattgtagatttgcatgtttgaatgttaagatgtaataattgttagtggatgatgatgctttaggatgtagtaggttgtaactttatagaatacatatattaatgaagttactttacaaaccattggattttagattttttttatttttttgtggtggtttagattgccaattgcattagtgttcttacatggcatggaacaaatgtctcagttgttgtccacctttgtttagtgagtttattttactcactccatatgttgatcgctttgatatgttaaacaattgtcaattagaagtttaatattttatatgttgaacaattggaaattattagtttaaatcaattctatgaatatatgaaattatgttcaatgttgtgttatatctactataaattgtacaattagtatttaatagttcagtgccattgatgctataaattgtacaattagtaatgggtactaatccttatccgtcagattttagaaataccacatcggcactcgaatccacatcatatgatctgcatctacattcatatctgctagatttctataaatctataccatatccttgttttggacggatttgaagtggatcagattgtccgatccattttcacccccaccagcattgtgttcatacgtaggaacactctagaacatccaatacgtacatactacaccataacatagatatagaagcactcattcatcaggataaacaggtattaaaggcaaattatatgtcaggaaaaaaatttgatgatacttagtctgccgcacgtgtctgacaggggttcaacaatcgacaaaagttgttaccattatatatctttttctatggatggagaaacgaaaattcttagtgatagaaagtttgacagtatattccctgatagatgaagggttaacgattatccacttttatcaatagaccacaacgtcctaattggtgttgtagtgtagtgatgtttcctcccccatcatggggatctcccactatcccgcaccaactaccgtccacctcggaggcacaccatcctccatcttcttcagtatccagtaagccccgcgcctccatcttctccagtattcagtaagccccgcgcagcggtgtaacagccatccctttagaaccgcatagccaacccatccgacgagcggacccatttacgcataccacaccacttacactttcgtcctcgcttcatgtaaaagggttaacccaagagtgatatgcttggaggaattatgctcttgctagactagcaaggtggtactaaacatgcgcacacagctcacatgggtaacacaggcattatcctaattgggccaggatgtcacacgcagtccctcatctttttcggctccaatagcctagcatcaccatccttctctttctttgatagctcttgtcaccggatctggatcagtcgccaccttccaccgcctcctaagcacccattacaagaattttcctatctacttttaccgagaaaatatcaatatttaaaagcacttcacataaactattgtggtgttgcacagtttcttactcagggttgtgaattttaaactctttagggaacatccacttgttgtatacattaaatctaaatatttatgaaagaaattgagaatatagattaatatgttatatatcatcgtataaacatataagttaaaattcaacttctatatgttgaaatagaaaagttaaactataactagttaactagaaaattcataattattttttaactagaaaaggtttaatttgacattctatcattatatattaatctatcttataactatttaaatgacatgtaaactatgagacttcaagaatttagaattacttcaaggagcatatctatttttacggaaagtggcattagtggctcatgtttttgccgcactctcacattgttatcccagtattcctgataggagtaggagggtatgacaatggacacacatataacacaatctacctatacaattagattactatgtagaataaagttactaaaagcactaattagcaccgtactatatccagggttggaaatttcggaccgaaatttcgaaaatttcggtcacctccgatacgatattatttcagtctcaatttttcaatttttcatgaatttgggtaatatttattcaaattcaactaaattttactcgaaattttccaaatttcggaccgaaattttcgaaatttcggaatttcggtgacccccgatacaaacgtctcaaccgatagagtgaaccctgactatatcgtttcctaatggtcattctatttataaactcttccgatttctcggcctccaccattttagcattgatcagagtgagactgaggggaagatgagaaccacaagtgcaacgacgccaaggcctgcgctgctggccaccgccctgccggcggcggacggcgcgtctgcgacgtcgcccttgtcgtgcgccggcgcgtctgcctcagtcggaccatccgccgcaggaccgtccgccgccggcccgtccgccgtggggccatccaccgccggtcccggcgcgtcggcggcggtgtcgtcgtcgacgtcgtcggacgggcccggtgccggggcatccgacttcttccccttggacttggacggcgagggtgccggcgcgctggacttggccgggtggggcggtggcgcgccggtgttgctgttgctgacggaggcgatgccgggcggcacgatgggggagttgacctgcagcacggagatgttgtaggggcgggtgacgacgaccttgaccatctgggacgtggcctgcgcgccgggctcggcggagccgaacaccatgatgccgtcggagcgtttggtgtagttgaggaagcccatgcggtcggtggcctggccggaggactggaagagggtggtgagcacggcggagcggttcttcatcttcatgccgccgagcttttcggtgtcgtagtagtcgaggacgacgtggacggagagcaccttccgctgctcgtcggaagggagcgaggagacgccgcccgcggcgccgttgtcgagtgcgagcaccgtgatggtctgccgccggttgatctcgtccgccagcttcgtctgcgtgaggaggtggttgaaggtggagaagtcggagaactcgccgaggatcctggtgatgttgaaggccgccgccggtgacgccagcagcgcgaggacgacggtgccggcgacgaggaggagcggcatggccgaggaggaggcgttcttgcaagccatggtttggttcgagcttgaggttaccggaggtggagggggaggagagagattgcggagtgatatagaagtcgcgcacgtggggaggaagccaaacttggaggaggaggcgcatgcatatgcatggttggctggttggaaggacagtgtggcgggcgcgtgacgctaaaccagggcctctagcttcatgggtgcttgcaatcttgcatggccgtggccatgcacgcgccaagcttctcgggcctcagttttgtcgtgcgctagcacgtcgcgagtcctacctctactcctatttaatttggtccctgatttttcttaacggaattgttaaacggtcattcaacaagatttcaaacagattttgaaccacccaatcggtgagaattaaatatgagggtgagttcgcctccccacagcactccaggcgaattcaggccgacgtgctcgcttccgcatctatccacgtcaccccgatcaatccctccattactggagaagtgatctttgctgggtcgagcgatttttgcaatagtcccggttccaaaaagaactgggacttaagaggttttttagtcccggtttattactccaacgggactaagggatctttagtcccggttcgccccctgacaggacatgtcagacccctgtcggacggctgaggaactttagtcataccaaccgggactaaagagatttgagatctttagtcccggtttaagcacggatggaatgtatccgtttagagagatgagcagcggctatagcacttggccggtcaccatgtgcatctacaatcatgtatagccgggggggagattgtagatgcacatggtgacctggtaacgacattgatgtgtacctaaaatcattggttgtagatgcacatgccgattattattcaaggcccaaagcaacctggtaacgacattgatgtgtacctaaaatcattggttgaagatctgaaagtgctttggaggaaagagggcgtccccgtgtgggatgaggacaagcgggaacaatttaacctacgagcgttgcttttcgttaccattaacaattagcctacacttagtaatctatccggacagtcaaactagggtacaaggcatgcactcactgtatggatgaaactgagagtacgtatctgaagcattgcaggaaggttgtgtacatgagccatcgttgattccttgttgcgaaccaccatgtacggaagaaagacaagcactttgaacagaagccaaaccatcgtactaagcctaaacatcgcaatgagaaagcaatgttcgctatggtgaaggatctgaaagtagtatttggaaaggggcctagcagccaacttatagagagcgaagatggtcacgcggagatgtggaagaagaactctattttttgggaactaccttattaggaagtattggacggccgccatgcaatcgacatgatgcacctcactaagaacctttgcgtaaacctactggcttcttaggtgtatatgggaagtccaaagatacactcgaagcacgtaatgatctcaagcatatggaacaacgcgagggccttcattcggaaccgactgagaaaggaagccattacttgagtccagcaagctacacctgagcaaggaagagaaggagagtatgtttgaatgcctggagagcatcaaggtaccgtccggatactcctcgaatataaagagaataataagcacgaaggataagaagttcacaaacctgaagtctcatgactgtcacgtgctgatgacacagctgcttcttgttataattcgtggtatccttcctgataatgtacgggcaacaataacgaagttttgtgctttcatgaacgcaattttccgatctcacaaagtcgtagtatacgacagaaacaaaaattacaaagtccgaaggaattgtaatacatgtatatatttatatatgcacacatgcatttacttttgtgtatacttattttggtaatatatgtgtatatttacttaggtgcaaactcatattttgttaatatatgcatatggcctctaattacttaagtgcatatatgtgtatattatatgtatttctacatatgtatgcacattgcatatatatgtgtaaaaacatatagaccacatatatgcacttaagtaaatataggccatatttacttaagtgcatatacatatatgtgcacactatatgtatctatatgtatgtatagatacatatgtatatgtgtaatatatacatttctatattatgcatatatatgtatttaaacatatatatatatatatatatatatagtaaatttgtttgatgctccatggtgcccgggcaccattgttgaaattgagtatatacccaattcaaatgagtatgaaactttttcaattacttaggtattaacattaactactttactaactagtttaaagcaagtttgaactgaatttgaacttgtttttgttagattttgattctaggtatatagcatccatacatataattagttaggtatgtaatcatggattgtgaaataaagttaaatttgagttgttttgttgataagtataggtatgaatcaaattattataactaggtatatactcacaatttgaaaattttgaaaaatttgagtgattttgtgcattagataccatggtgcccgggcaccatggtgccccatatgagtgtcatatatatatatatatatatatatatatatatatatatatatatatatatatatatatatatatatatgtgtgtgtgtgtgtgtgtgtgtgtgtgtgtgtgtgtgtgtaggcagcacatagcacaaccaaattaaaaaaaagtaaagaaaaaaatcaccaaccgggactaaagatggctgagccagccacgtgactaagccatctttagtcccggttgatgttaccaaccggaagtaaagatggagctttactcccgggtatttgaaccgggactaaagaccgccatctttagtcccggattctccctcctggttcgctacccgggagtaaagggggttgcgaaccagagagatgaggagttctccaatagtgctccccgcgtgcacctcggctggctgtgcaccctcgtctagttttagtgattggctacggcccaacgagttagtttagggctttagggttgggtcagcatgggaggggatgggggctagtgaggctgtgaggggaagagaagaagattgtcagcatgggaggggatgggggctagtgaggttgtgaggggaagagaagaagattgtcaggcttagagggataatcataggaggtggtggcgcaatagtgggtgatggaacgggcaaactgtggacggtgaggtagtggcgatgcctccgaaaccatggttctatagcgagcggttggccaacgttggcagtaggagcaaaacaaatcaagatgttaggaatggtggctagtgatgatggatctgatggatctgatggtaaaaaaagacgggatagggacatggttgatattcaaatttggcagtagtttaaatttatagcaagttcaagctgattcgacagacacctccctactgctagtttgaaaatgacaggtgcggaagagaggaggggaaggtccggcggacctcagtgaggcaggtgttggcacctatctgttgcatctcagcttctgcaatatttttcctttcatggacaagacaagaggcaccttgaactagacatggtgtggtttttatttgtgggattgctagatggtattcgatatactattattaaagccaaaatcttgtaaatttccgatcttgggatttgcttcacgattcgtgctctggcaaccatagctcttctccagctttgatgacacattcttctctaactctgacaatggaggcaatggagcttttgggttttagggtcccgggttgcaggggggtaggaggaggccataaggcaggggagattcctggcttagagagatggcaatggaaaggcggtggcctagcggtcgatgctactggtgctagtgatagcggcggcagcatgaggagggagtcgggatagggatggagggagaaggggtttttagggtttgggtgccttgcataaatcttaaagcaatcggatagtctagaatttacatgattcctaaggggtttcctgtcgaacggtgggtggaaggtaatactcgaatggtgtgtagaaggtagacaatgccttttttttttttgcgtaaaagcgtatctaggatgtggttaggtcttgttcattaatcccctatccaaaaggattaagagggatttgagggcattaattccacatatattgtgatataaaattattttccctcattttttttcaatctctttcttgtagggattaaatgaacaaggcattctatggttggcccttaacggtgtaccctctatatatggcgttatgctacccaaacgatattcgacaagtggtttatcattctagtcctaatatagaattatactacccaattagtaatctggtcattaccagccagaattgcctagatttcatactgcttgttccggtaccgcccaaccatgtgtaacctctctttcgaattaagctacatgttgtcttgttaaaatcttataagctatacttgagctatgaacttatttatctatatcgcatttaatctaatatatatttgaacagttacaaatgaaatttgatagaacattatattacaataagtattttattaaactcgaaacagtacacatgtatcagccaactcagcaagggaaattttccgttccaaaatccaatttaattccgtttaattaaccatgtgattaatttcagaccttaataggtacggaacaaatcctcttacgaaagagattaaccagacgagtccttaaatatctcaacgatggatttttttttccccacctctacaattaacctatacgtctccttgaatcagttgattaccataggtcctctgctacagcttttcagaaaacgtctccactatatatttttctcgtgttttatgtcctacgcaactgtaggattgacaaggatatacttcctccgtttcgccgttgatttttttaaatatgtttgaccattcatcttatttaaaaaatttaagtaattattaattctttttctatcatttgattcattgttaaatatatttatatgtatacatatagttttatatatttcacaaaagtttttgaataagataaatggtcaaacatgtgctaaaaaatcaacgatgtcaaatatttagaaatatagggagtatctccaatccaatcagccatgtacaagtgtactggatttttcacattttggtccttttaaaaaacttatttcgcaaatagacccctagaaaaacttatcctaaaaatggtcctttttggggtgccagagtggctggcgccgtccttcggcgccagcctctttggcgccgtccccctgccgacgtggcggggcgatgctgaggtggctagggggagtgcgtcagagtggctggcgccccccccccccccgaaattttttatttttgttttatttgtttgatatttttttcacgcttagggacacacaagaaccaaccatagaaaaattgaactcaaatggacgtaatatgtgacatgtagaatttttcctctcctctcctctctctctctccgaactagtgcagaggagagagatgtgcaacttttttatttttattttatttttttgatatttttttcacacttaggaactcacaggaaccaaccatgtaaaaaataaactcaaacggacgaaatatgtggcatgtggaattttccaaagctccaccgaaaaacttctctcctcgaaaacacaatcttgcaagcggaatttggaggttttaatatcgctgaacccagcaaagcaggggagaatcaaatgtaactttttctgtagatgtccgtgcatatattatttgcctgattccgagtccgtatgagaaagttacgcctattttaatagatgacatattttgtctgtttcggtagagttttggaaaattctacatgtcacatattttgtccgtttgactttattttttatatggttggtttatatcttctcctaagtgtgaaaaaaatataaaaaaatgaaataaaaataaaaaaattacatctctatgtactgtttaacttatatatgtcatttcatgtggttatattttgaattagattaagtaatttcatatagtggtagattgcattatgtttaacatgctgatcaaagagttttactaaaggagttatggtctaattttagtgaaggtgcaaagtagactaagtggtatgctagatattttcagacttagctaagtggtagtttgagtttaaatttttttttgtggttggttgtatcgtgatcctgagtgtgaaaaaacatccgaaaaaataaaataaaaatgacaccgttacaactccatacagagaaagaggaatggaggcggcggcgccagccatgctggcgccctcctcctgccacgtcggttcgcgtgcaccacggtggcaggaggacggcgccgtcccgttggatgacggcgccagccactctggcgccccaaaaaggaccatatctgggataagtttttttagggtctatttacaaaataagtttttcaaaaggaccaaaatgtgaaaaatccagtacaagtgtacacctcctgttcccctcgacgcctacctgactacgcattacctgcaacagcctgcatttttctaaaccctctaatgaatactagtagcttgctcaccacccaattcagtgaattcgccttcctaagtactaacttgtttaaccagtgtcattaggaaggtcagctaagtacgtaaccagagccatcccctgtggccgccacgcctcctcccattgcttcacacaacggtaattgccatcacaatcacaaattatcgcattgccggccgcccacaagtactaaaattcttcgccgtgatcttgaaaccaaagcacaagaaaagagagagaagaagagaagattattagcatcctttgacatcaaaccagggcgaacaaaacatcccttaaaccaatgcattttgacttgcaaaagggcattcttagcaagcacataaactgggcaaatgacaattgagcctatataagacacccctctaatgctgtcctaactcaaaactccagaggaaaagctagccagaaaaaaagtgaagtggatggaacagaggagaacagaagggaggaaagcaatggagagcgccgccgccgccgccacgtcgccggccggtctcctgcacggcgcaggcggcagcgacgagctggggcactcgtcgagggtgtaccgcccggcgagcgggagggtgcccttcgagtgggaggacgagccggggaagcccaagagcccgccgccgctcgacgcggcaccaccgctgctttgcccgtcgccggcgatgcagagcgctcggctcaccagccgaggcgatggcggcagcggccggcgggggaggaagcgcgggaaggagccggagctagatggatgcctgccggtgaagttgcagctggggagagccatgaagaggtggcacctcatttgcttcttcaggggagaatgatgtcagaaaccatgatgcacctgagatgacttcgtgtgtacttggctgcaacctttgcggcggggggaatacatgcaatggaaaaaaatttttaagtccttctgtacatgaatcagctgtaaagtacaatgcaatttactttcttcccactgcataaacgattcttcctattgcaaagatgatttttttctgtttcaatttatgcacaggtcaggacgcggaacaaatccaatttgtctgatttatagcactatacagaacaagtggaattagaacgtagaaaacgaggtttaagcgtgtgctgaaaagcattgaaatttaaacgtcagcaccggcttaaaaatggtttctgctatttgcaaacctaggggctaatcaacttggataatgtgcagttgcggacaatttaccttgccaacagccaaccatataactacagtaaaattcaggggaaaccaactcttgaccagttacaggcaaaactcggccgttaaccaaagctatatgaaagttaaatttaacgacatattcagaattataacgctgcatgcaagatagtactcagcaagacgttcagagtataaagctgcggccaaatttgcaaccatcacccaccaaatttgtaaccatcacccatcaccaataaactcattccagaatctacaactgaaagtaaaggctgtttcagtttgtcgtcccattacctgaaaaaaaaatactaagagaactgtgagcatcggtaattcagaagcaaatgactgcacaagcattgcttggggctcaccaaattatatgcagaaacagcatggaaagttgtaaacccatagttcaaaatgagccaccaaattctgtatccctggaatgtcgacagagcaattgatgaaaaaagagagatcccatagtctacaaagttttgcgaagtaactagccatcaaggttatacatgctcagtagcagttcattgcctactatgtccagcaagacagcaacatgttccagtagtccaatgcaacccaatatcagaatatcttcatcatcctacaggacaaatatttgttttttcattagctaacaaaaaatagaccagtagtagctacttcctctgtcccaaaatataagaacctaggactggatgggacatttcctagtacaacgaatctggacagtagaaaatgtcccatccagtcctaggttcttatattttaggaaagatggagtacttgctagataagcaagacatgagtaagcaagtaacaggccacgatatcagtcattctaaactaacatgttagttgccagaagacaaacacagacaaatttcagagctaaaccaagaaatcacatgacttgacaattgccattgaataataagactggtgagaatgtgctatctatagcttttccatggtcatggggaaagcaaaacatatttgacaactaaaatttgttaccatgaataaactgcatcacaaaacaaacataacatgggaatgtcttaagtaagataaccagtagtctctaggaatgattcatcactagtctagcatatcttagctagaaccaaaattttagaatgcagaatcaaaggtacagaatcaagaaaaatatgaaatggtaatatgcaaattgatggcttatctcagcagaaatgggtggaactaatggaacacgatacagaaaataataggacaggtaatgttatgtttgcgatcaccatcagtacagatcatgcaagtgggatgcataccggccctctctctctctctgctggtttcaggttgccataactcatccctgtccctccctctctcctggcatgggattggggtcgccatagacaggctggtcaaggtcaacgcgtcggacatcctggagctagcagagctccacgacgccttggcgacactatggcaatgcctttaaaaccatggttgtatggctatggcaacgctaattgcttcatagcccctggtcaagttggtcttaggctcctagctgctagccctcccaactatctattgtagctcatcgaaccatgacaaagaggaatcaaaatgactgtgtttcccataccttagaaataggagcaagaatggtaggggagatgtttcttgcaagttgcaaatgcagtagagcaatattagtgataaatgtgggcaaacaaggaaaggagtcaataaattcacgtgtaaaccttatatttcatcaatttggggcagatatgatttgcagtttgatttgtattaggatatcatcctaattcatgtaagaccttatgcagcaatgagcaccaaggagcatacttttctcccatccatcgaataccatgttagcaagatctttactctcatttgaaaggatggcgctaggagagttagggcattttctgtctattttcttataaaagctatatcatcccaggagaggttggatacatatttatagctatagctggttagctgcaggctactctaaaaatgagcgggatgctatcctagagagcatccaaactgaaagcataaagcatgctatcctaaaaagcatccaaattgaaagcataaagcaaaaactgaaagatattgtcttaataggaatagatgctgtcctaaaaggagaaaacaacctaaaagcaaaaaagaaggaccacaaagaccaaagaccaacatcacaaggacacacaaggacttattctgtcattctccccctaagtcttgtacgtcgtcttgtgggaaagtcgggccatcccggccctagagcaaaagctcaaggaacttgatcctcccaaggggcttggtgagcaggtccgcaagctggtccttggtgttgatgtagctcgccttgatgctcccttcctctaagcagcctcggatgaagtggtacctaaccctgatgtgcttgctccgttcgtgaaaaacggggttctttgccagggccagagcggacttgctgtccaccctgagctccatcgctccagtgtctcggccgaggaaatcaccaagcagtcaagcaagccagagcgcctaggtcgaagcggtggaggctgctatgtactcgacctcgcagctggacagggctaccgctgcttgaccgactaccagctaacgaggcactcaccaaggaaggagaatcccgctcgtgctcttgctagtgtcgatgtcgccggcatggtcgttgtcgctgtacccgatgaagtgtgccttgccaggacacctcaggtagtagaggctgtggtcgagagtccccgcaacgtagcggatgatcctcttcacagcctgctggtgcttcgtcgtcggtcgctgcatgaaccgactaacgtagccgacggagaatgccaagtccggccgtgtgtgggtgaggtagcgaaggctccctacaagacgccggtactgcgtggcgtccacctcctccgtcgtgctgtcgcggctcagcttcagtctctcctccatcggagtgagctaggttgcaatcagtaagcctagccagctcaacgacgcgcttggcgtaggcggtctgtcgaagcgtgatcccggagtcgtcctagtgcacctcgatctccagatagaaagagagaggccccagatcactcatctggaaggtggcattcatctcttccttgaacgccgccacctccgcatccttggtgccggtgatcaccaagtcgtcaacgtagacacccaccagcaaggcatttcctccattgccccgccgttagatggccgccttgtgcgtccttgtgctgttggtctttggtctttgtggtccttttttgcttttaggttgttttctccttttaggacagcatctattcctattaggacagcatctttcagtttttgctttatgctttcagtttggatgctcgctttatgctttcagtttgaatgctctttaggacaatatgctttatgctttcagtttggatgctctctaggataacatcccgctcattttttagagtagcctgcagccagccagctatggctataaatatgtatccaacctccctcaggatggtatggcttttatatataagaaaatagacagaaaattgtcccaactctcctagcgccatcctctcaaatgagagtaaagatcttgctactaacatctggtatcaaagccattctatcctgtagccaagacatctcttgctcatccccttcccgagctcctctctagcaggaacaccggctgttcctgctcatccttcctcccctgcactgacgagcagcagctcgtcagaggcagcctcttccccacgcagaagccccccagtagcgtgccatgtccgcaggaaagtcaagcgctcggtcgcctcgagcgcgtggctccggcaggaggccgagctcgccacggcagaggaacgcgagcaagcggcaacaaagactgctgcgatggcagcaagggcagcaaggctggcggcggcggaattggcggcggcaagggcggaagtggaagcagcggcagcggcggatgcagcgcgtgcggcggtggcagagctcaaggctctgcgcgacagtagctccagcagctctgtctccgcctacgacatccccgctgatgagctaacaagggaggcagctcgtgagcgggtgaagcagtgggcagccgcgcaccccgacgcgcgcggtggcggcagcccagccgggcatggacgcgccggcggcgttcctggcgggagcgcgcgcggcgacagcagcccaaacgagcttggacgcttcggcggaccccctagcaggggtgcgcacaacggcagtgctcccggcggcaacggttgggttgacgaagatcgcgatcgttacaagcagcgcgtctctccctccccggaccgataccgtggacaccacgggattcaggatgtcatcagggaggtcggccccggcggtgggtggcctatcctcaccaagaccaactacgtcgagtgggctgcggtcatgagggtgaggctccaggtacggcacatgtgggaggcagttcggtacggcgacgtcaactacgacaaggatcgacgggcgctggatgctctcatcgctgcaatcccgcccgagatgcagttctcgctttcccagaagcgaactgccaaggaggcctaggacgccatcgctgcggcacgcatcggcagcgaccgcgcccgcaagtccacactgcaggcactcagcaaggagtgggagaacctggccttcaagccaggtgaggacgttgatgactttgcccttcgtctcaacactcttttgcataagatggtgcagtacggtgacgacacctacgaggagagagccgtcaagaagctcttccgctgcgtcccagagaagtaccagatcgctcactcgatcgagtctctgctggacctctccacgatgtcgatcaaggaggcgataggtcgcctcaaggtcgtcgacggcgatgagccacagcctctcttggggcctatcaccattggcgggaagctccatctcactcgggagtagtgggaggctagccagggtgacgggagggagactcctactcctcgacgggcggccacaagcagcgcaaggcacacggaggcggccagctgcggtggacgcgaagacgcaccgagggtggccctctaagaggcacccagggcggcgccgctagcaaccataagccagcacgagacgacgcctgccgcaactgtggcaagcttggccattgggccaaagacggtcgacaggctcgacgcggctaggcccacgtcgcacaggtggaggaagagccagctctactcctggcacacgcaagcatcgagctctccagcagcaccggccgcagcggtttttctccacctcgacgagtcgaaggtacacgccttcctcggcaacagctccaacaacgacaaggctaatgggtggtacctcgacaccggcgccacccatcacatgactggccgacgggagttcttcaccgagcttgactccagcgtccgaggctccgtcaagtttggggatgcctccggcgtggacatcaagggcgtcggctcgtcaccttcaccgccaagtccggtgagcacaggctgctcaccaaagtctactacatccccgcgttgaagaactctatcatcagcatggggcagttggataaaaacggctcacgcgtgttggtcgagcacggagtcatgagaatttgggatcgccgtcgccgccttcttgccaaggtaaccagaggcactaatcgactctacattctcaacgcgcaggtggcacaaccagtttgcctcgccgctcgtcaagacgacgaggcgtggcagtggcacgagtgcttcgagcgccttcacttcgaggccctgaagaggctcagtgccaaggagatggtgtgaggcctgctgtgccttgaccacgtggagcagctctgcgacatctgcgtggtaacgaagcagaggcggctcccctttccccaccagacgagcttccgagccaaggagcggctcgagctcgtgcacggggacttgtgtggcccagtgacatcggccacaccaagaggacgacgttacttcctgctgctcatcgacgacctctccccactacatgtgggtgatggtcctcagcagcaagggagaggctgcggacaccatcaggttgcaagttccacatgctgcgcaccgacaacgacggcgaattcacggcggctgaattcgcgtcgtactgtgctgatgagggcattcatcgccactacaccgcgccatacagcccgcagcagaacggcgacgtcgagcggcgcaaccagacggttgtggggatggctcaggctttcctcaagcagagggggatgccggccatcttctggggagaggcggtggtgacggccgtctacatcctcaaccactcgcctaccgaggccctcgacagcaggacaccgtacgaggcttggcatgggcgcaagccggcgatctcctacctgcgggtcttcggttgcctcgcgttcgccaaggagcttggccacatcggcaagctcgacgacaggagcaccccaagggttttcatcggctacacggagggctcgaaggcctaccgcattctcgatccggagacacagcgtgtgcgcacggtgcgcgacgtagtgttcgacgataggcgagggtgggcatgggacaaagcggtggacgacggttcgactccgacatacaacgacttcactgtcgagtacgtccacttcgagggagctgggggagtaggcagctcttcttcaccgagcgtgtctaccccagtccccgagcctccaccgactccggcacagacacaccctcgagccactacttcgactacgacgagctcttcgtcgacaccaccacagccggcgaccccacgcactccagcaccaacagccactcctccgggcacgtccaccccgacgccagctcgtgttgagcacagcccggtggagttcgctactccgctctcccacgacgaggagcgcatcgacgcgtaccacgatggcgagctgccgcggtactgtacgatggaggacctcctcggtgaccagtcagtgccgggactggtgcctcgcgacctggaggcacagttgcaccttgcgtgcgacgatggtgagcctcagtctttcgcagaggccaagagacacgcggcatggcgtgccgtgatgcagtcgaagatggacgcggttcaggagaaccgcacctgggagcttgctgacctccctcgtggtcaccgcgcgatcactcttaagtgggtgttcaagctgaagagggacgcacaaggacttttctgtcataccatacgtccatactgatttagagtgcttcatattacactatggtctatgaatagttgaaccaacttttgttgagtaaaatgtaacttagatccacacttgatgtccatctatagtccacatttgaacatagccatttccgaacttgtttatgattaaaaccagaataatgaatatgcgggatttggctaacaaaaggcaacagaatgtttggtgcaagcatttgatagcaaatataattccaaatgcttagaaaaccttgcaatgcataccatggatcaattacaataaaacattttatatcttcaaaaaatcataaataacaaaatccatttgaaagtattactttcaagtgacttttatatttaatatgaaatgccctggcaaattattattattatttctgtgcttgtcagtctcataaagagttcagaacattccaatctacacatttgatatataaaaacatatcgcaaaatatcacagcatgcagagtttaatcccatcgcccacatagaatagttaccctgtgaagaagatttagagcagcatagccttgttcaggcctcagtccctcaaggaccaacaccgttttaaagctaaactacgatcttatttcatgcacatcttgctactacaggcaagtccaactacaatgagaagacaaaatggttctgaagatgaaatacagaatactagttttgttctgtttggaagttgaataaaacagctagtcagaacataaaggcactaatgaaactaaatgccctgcgtacaaagtacagacatgctcatagtttaaaatgccacggcacttaacatttggaacagatcttgaacatacaaaatccatataaaacagtttggattgtaggtaagcgtaatgtttgtatttcgctcataattcagaacattcataacaagatgctagtaacataactcatccagttagtcaaaagattcaggcgcaatttagcgcaaatttccacaagcaaaacaactccatccaactcatgccttcagtagaattaaattgtgctcgcaatcagcaagcaggtctataaaaaaatctagaaaatctaagagcaaaaggaaatgcaaaccttcctctcctcagcggttgcgctccggtggaaggggccggttgaacccgccacggcggttcatgtactgccgcggctgccgcttggtgacgacgcgcaccccgctgacgtcggcgtcggggacgtgcttccccttggtggagtcgaagccgacggggatccccatcatcttcatcatctccagctcctccacgtccacatccccgtcgcccggcgcgaccccgtccccggcggcgctcttgggcaccacgggggcctccggcttcttgtcgtccttgtggtcggtggcggcggcggcgggggacccgtcgcggcggcgcttgtggcggccggcgtccggggacggggacgagcggccgcggtgggagtgggagtgggagtggcggcggtgggagcggtcggcggagggagagcgggagcgcttccggtcacgctccccacggcggcgttcgcggtcgcggtcgcgatctcgatccctctccttgtcccggtcgcggtcacggtggtcgcggtcgcgggggcggtcgagctcgcggtcgcgctcgccgtctcggccgcgttcccggtcgcggtcgcggggcttctcccggtcgtggcggcggtcggacatttgtgctgcgaggacgaggaagaggagaggagaggagctagggtttcgccgagggggagagggctttacatgggaaagttggatgtgttccgccttccgcgttcgggggaaattctatccccttgttttcgaattcatcctcctgtcctgccgtttcgttaatcaaaaaatctctagatgttttcgtcagtaatttaatacgtcgtatgcgtatgaatcggtttttaagttcatttgcttttgaaaatatatatccgtatttgagtcaatttataagatcgttcacttttggtaatacagaagaaatcatataagaaatatgtttaaagaaactcacatgtcaatgtgaaacgatcggactcctaactatagctcatgattttctaaaaatatatatatcccagcgaactcgaatttcattttaactaaaccatataacaataataagattaaaatagactcacccgttacaacgcatggacattttttctagtaaactttttcgaaaaaaatgaataaactaccaaaataataattgattaaaattaatatattttttaaaaaacagtcacatttaaaaaagtcggtttcttaaataaaccattgcattaccagtgtagttgctattaaggaatgaaaaattcgccataaataattacaatattgatgacagtggaaaaatcacatgattcatagcttttctcacatctagagaagacgtactgtaaaacttcaatgtttctaactattatatatatttgatctaaatatatgatagtaaaaaatagtttccttctaattactaatatagtatgttgaaaagagaaaactaactcgtttccaaaatctggcatgattttttttgagccgccaccaataattattattgtctcacatttctcctcaattttcctttctctatgccctagcattgaagcaagcaattttcttttatctaaccctgtgcctaagtaaaatctaggatgtatggatagtcacatacccatattggatacaccgtcttatatatctgtatcccgtacatatcgccaattaccaagatttctaaataaaagaaataattccggatactttcccgatacatatcgacgcactcctaataagtccaagccctagcatcgatcctgacatccaccccgtgcgccaccgtcgttcaaccttacgaagcgcagcaaggcacaacaactagcatgttccaatcgttggatatcgagcgcagcgcctcaaccgtccgcatagtgtagaagtgtgctgccgtctaatgtgttgcctccgccgtcctcctagtgctgcagctttgctctccgacgaacaaacgcagagcacctctgtcggccattgggtgccgcagccagcagcttggcagccgggcacattgctatggccgctaggcacaaagtaaccctctcaccacctttcacttgttcatccactccacttcaagcccccttcaaatcttcaatgattttttatataccgtcattatgctagtaataaccgctaatgcaaccgcaaattcataacgttagaggagatagctatgagatgtttcattttgcttgttttctctagctttagtgaactcctactctcctatcactctgtgcatacaactacaaccttaagagagtactagaagatcttggagcgtttgatctatctgatgatgcaagaaacaattaaactgatctagctatctagatattgagttgaacctgaagttctgaacaagtttgttctaatttgtcattgatttttttttatttttctgcactatatatatatagacgtatctgcgtatctatgttttttttagaaaatgttgtatccacgtatagacgtatcacgtatccgtatcatggtacatatatcaaggtaacatagagtaaaactaatggaatatgaaaaacgagaatgaggtgaacccttagctccacccactctcaggcacattgttggtggctcatatcagcttattcattgacctattgctctggaggaatcaaatttagccaaagatgatgatgatacaaacattgagttacaccttgcttactgttcctccatggttgacttcaccaccctttaatcagcatactctaagttgatatgcagagatgattgttaagtcatgagtgtcggatcttgtttgaattgaatgaaatgagttgggatgagaattagtggcaacctattctcttaaatttatatgggcatgcaagggatgatgtaaggtttgtcatgagccaaacatatgatgtttagccgtcctaagattttgttctaaaccataagtatgggtgccctagttgcagcaaacatttttattgttgtatgaaaaaaaattatttctgcgcaagtagtaattttggttgcaatgggtctgcccttaattgtagcaaagattttttgcttattgaataggagcactcttgataaataaaaaacacaagaaatttgctaaatagacgtttcttttgaataaggatgatttagttgaggattactagcgacatagtgtttgataattggaaaaaaaaccaaaaatagttgtaaaatagatgttcatttgagaaggaatgatttagttgacggttattgttcaatggagatagaaaatctattgtactgttggttgccacattgcgagcaaatgttttttttaactcatgcatttattaatatagctaagttagagacatacatgagtggttacattgcatgaatcataggtgtggactgggatacatccacttttgtaaagaaaccccttggcaatgggtaaattacaccgtctataaatataagcttcggcgcacactatattttgcgggacaagaaagaaagagtcaaagccattgatatcactgcaagactatcagcaattcctcgggaaatccaaaatatagaaaacactaagctcaaactagagcaaattctgggtgtcctcgaggagtctttatttctggctttcgtcgatctagcagtgatcatacaagatcatatacttcttgttcagaactaaatccgcattcttgaaaacaggaagaaggcattgctggaagaacagcaatcgctcttcgtgatagctgcccttttaagctacattttgcagaaaaggacttaggaagaattgaaaaaaacaatcaggtccttcttcttcgattgcttgcagcgtcaacaacgaagtcttggagcttgattccaacagaactagaagcaaggtgtcatggttacggataaggcatacctcatatcctactactcatggaatgtacggatacgacataccttcatatgtgtgatatgtttccatatacaataaggaaattagcaagagattatggaaattatcctcacgagcaagtgaatgtcagaatcctactcggggaggattgggtttgtattatatcggatggggtccatagtctctgaggtctacttggagacttaggtgattcacagtataaaaggcacacctcctgaggggtttggatcatcgaatcatagcatcaacacaaccaccatagcctataatctagaggatgcgaagcctactcaccgggagatctcgtcgaatctatctcgacaaggatctcgccggtaatctcgagattgttgattctccattgtaatatgtggtctttccatatcaatctcatataaactggattagggctattaccttacgaggggcctgaatcagtataatcctcattttcttatttgcttgatgtcatgtcgtgtagatcctcgtaccaacgtaccccactaccctattcattcggtctatgggtatccccgtcgacacaaggtgagctgcatatgattgaatcactgcataatcccaaaaggggccctcacacacatatggaggttcaagcgatagcatacaaatcgaaatttcagccacaccacaaaagatttccactgaatcataagccaaagaaagatgcaatagcaacaattccaaagatcaagtctagatccaaagcactgacgaagtatggtgaagaagcataagaagttgcataagaaaccaaagaccacacccaaaagaggccttgatgcatgggaggttgaggtcagttcggcttgagtcaacaccatcagcctcccataaagaactttcgccgaagctcaggaagaaggcatgcatccctagaacgagctcgccaaagataacggttaacggtgaaggccagtgcgacctcttcttgtgcatatgtggaagcatcctagccagtagataggacgccgtcgatgttgagacttgctgacgggaccaaatctgacgatgagcctcacaacaccaatgccaaaaaccacctcaagaacctcaaaagcaaaagctacgggagtaacctgacaagacctacaactactactactactactactagaggaacgacatcggacccctccccaccctaaccagtggcgaaccgcttgagagaaggaaaaggggtcaggaagaaatgagcggtattgaagggggatgcgagagagttgtggagagaccgaggagagtgacacccaaagagcccgaccaacccaaaagtttaagctggtgaggaaagacggacaattcactttatattccaacaccatccccctacgcgaggccccctcaagcctctagcatggaatagaagtgtgctgcaatgtttatttaattgtgtgccagccaggattcaaactcgagacctttgactctgataccatattgagttgcatatatcgaccagttcaacccaaaagcttaaactaataaggaaaggctaacaattcactttatattccaacaagcgatgtcaaaattttcaattggtgcaggagagtcacatggtgggataatcacgagcgagctcaaaccaaaagaaatcggacggagcatgtgcacacttccatccaattgctaattgcgtccttttggaaatgtgaggacaaaatgtccggttaaaaataaactttgaaaggttaaagaaatgcgaaggtatatttagtttgagaccttattaaaaagaaaaaaaaataagcctagtgttgaagagtggcaacttttgtttcttttttctttttttttttggggggggagggggtggggggggacaggcaacttctgtatttccccatttttggtatgtttgagccattgaggacggtagtaaatcaaacatgcatataggttccgtaatggaaaaatagcatgcttgccgtcattctcacttggcatgttatgatgacacaaattgttggtgactgaagttttgtttttactagttatgcgacaatcaaaacagatatttaaattagtatttggtagaaacatgaatgaatagataaagtcatagagtaatataaaatgttatttccttagtctaacttgatcaacacattcgccataataaagtcttggagcgattttagtgattagaattttttgcgcatttgccagttgccaccacacatcaaggttaaagagctcagaagaatatgcaatttgcatatttcacggaaggcaaaaaaaaaaaacactattaggcattgcgaatatgcaattttgtcataacataggattacaatagagatcctggcaggagtgaacaaaacgcctagcagtctcaattcccttccagcgcagcccgtaaacctgccaagagactccatgcagttgaaaaacagacaaccacctttacgcccccaagatctaacaaatcgaacttctccacacatttgcttagctacacattcaacccagaaagaagtcgctgcaaaatgctcctcagcgtaattccagaaaagaactgctggttttatcatgtgaacagaccttctaaactttctgcactttgctagtagtaagctcctttggcttgccagctttgccacactccacttcctgcagtcaactaaaattattaggcactggaagatgcaagttacaacccttctcatcaaagttctaattgggatgcttgccaattcatttattataatcagataagcaattgtattgcataaacaatgatgtgacaagaaatgcttctatgatacaattacaaacatctgatgccacaaggggtccatgacatagctgcactatacacccatatggccgccaacaattgaaggttaggatttggcaaatatcagataacaccaaaggatgtagacatacagccatccaaggcaatactattaattaaaatggtgagtccttttatgatgagtgatgacctcatggagttaaatatcacattcttctaaatagctgttacaaagtgcaagttgaacagcgcagttggagaagttaggtgggtgtgctcattaccacattaaagctaatcaattaagaagggtatataaatgtgttggtagtacctcattacatgttgacaatgctctaactgccaagtgttgcaacaaaggacattgtttgagttcctattttccatataaaagacaaatttatattcttggtaattgtaaagtcttatgacaatgttacttcgaagttcgaacaaagcagaatagttagaacaaaaaacattcataaaacattgtccatgtggtaacaaaaatcattgaaaaataaccaacgattccgccaacttgctacattgtctgtttgggatggcactcctaaaacaaaacaggcattccctagaacataaccaaatgcaattgtacatctgtaaggaatcaccaacattctctacaaatgtgcaagtgtgtaaaaaggataggttgtaaaacaagtatttataaatgtacataaatgcaaaggtggcataggtattctatggcccctaagataaaatcagttaaaatggagtgagctagtctattaaatatcagatgtttgccagtttgccaatcacttaatgtgatttagtcactccaagcaatggaattatgtcccattacgtaaagaaatcagaactgtttcttccatacaatcctacctagtaaagccatcctgaacatacttatcatatgaactattcatatctaactccacatcacacttctaaataccctgttgacagttcttctaggagcgtttaataacagaacggtcaaaaggtttacagtgacaccagtcccaggggcatttgccactgatacgaaggacgcaaatatcagcagggacaaatttgtcatttcaccctcttgtcaatcatgattgttgcaatttacaaatcatcataagtgtcattaagtgtgctgagcggaaataattaatacaaacagcaggtacactcaaaggtagaatcatggaacaactttgaaaaagcttccaagagcatctctctatacaatatgataagcctactgcacattttctaccaagtgataactctcgatcatttgtatagatgctaaaaagggcgattaggtatctatccttgccttgtgtttcaggcctatgcttgaatccacctttacagatgttaggccgaattgaattttgctgcacacactcaatctaaaaccctttgcatatattccccacaacacaaatgcctttcgggcccaaatagtacctaccacataagacacacctacgagcatctatcacactcagaacgcacagatcaacacttttatgatctaaaggacatggtcagaaggacagctccatgttcaccatcaagtagtagacttcaccaggataaactacagcagcatccaccataagtgcatcccaccaaccaaacagaaacgtttgctcaatttcatactgaaaattaccgagcaaattctatcccagattctcattacgggcgcagatccagtaaagaataaacatgcacacgaagcaacctacacgacatggatcgaatccgattccccgaaattacatgcaaaagcagcaaaatcgcgtaagagaaatcagggagaacgaaccttgccggtgctctcgtagtagtcgttgagagcccattggtacttggattgatccagcccaaaccagttcgccacgtactcgtcgaggctcgcgtgggctgcggcgaccggagagaaattcgacgcatcagaatcccaaatccggagctaaaatctgaaaatgcagttgaaaaaaaaatctggatgcgcctcaccttcctgcacgcgcgcgacggcgtcccagaagaaaccaaacgccgatccgtcgtgcttgccccccgcggaggccttctcgtactgcggcgggggcacctgcaccggaggcggaggagggaccttcaccggagccgcaggcggggagaacttcaccgggatcgtgggcggcgggctggccaccctctgctgctgcggcgagggagccggagacggcggcgacggcgaggcggccgtgcgcggggccgtcgccggggtcgagaagcccgaccgaggggactcggacgggcgcgaggagcgcggcgtgctcgccggcgacggcggcgtgatgaagacggtgaggttcccggccctcccgatcatcggcggcggcggcggggacggcgaggaggtggaccccatcccggcgacggaggaggaggaggaggtagggtttaccgctggagcgtcggggcccctagggcgagcagcagcggcggggagctcgtgggaaagctcgagacgccattgcagacaagggggcagtgaagcttttgttcgcttgttaggaggagtgaattgtttattttattttatttttccaatttcccccctccgcctttcttttttaatccctttccacccatcaaataacgtgcctttggaggttaccaccccgtggagagaggccgcatgcaccgcgtctaccaacgccccgtcgagtcgggcccaccgtcagcgacacatgcgcacggatggtccacgcggtgtttggtggacgccgtgcaggcgaagaccaccgagggggggcgctttcatttgtaatttcccccctcttctttttcctctcaaacagcgtgccttttggcgatggccgtgatgtgggcgggcctctgcaccgggtccactgaaccagggtggtgcggggcccacgtgacagtgggatggtgtatgcagaccgggtgtagcaggggaggcggtgaggtggggagaggtaaaggggctctgggtgtgtttggttgcaagccacactttgccacagtttgccacgcctaaggttaggcaaatttgacaggtgtttggttgtagccacagttgtggcaagattcccctctaacaaattaggtcccacgtgtcaatggctcaaaaaagtgtggcaagattcctttaggcttagtaagttgtgactaacaatttgatcacctcaccttagacaaggtgtgtcaacttttgttggcaagtaatagtaaagtgttcctggtaaccaaacagcccctttgtcctgcgagcccactttgcgcgggggggtcgatcgggtgaggggagggaggaggagagatggtggattacggttttgcccccggagtatgggcggattagcggggcggtgacactgtagtggagtgggaagtgggaactagtaggctgttttgattgctcggcctcgtttgttgctctttctaggcgagaatgattgattggtcggcctggccacatggaagcgaggggacaggaggggatagtacgcctgcacggcacagccgggcggcccgggccgtcggatccgaagatcacacacacacattccacggtcgctaccttttgcaaatccgtcccacgagcttgcaaaacgttttgatagcggggatcaaaacgtttgtttcaatattaattttcatcgtaggttatatggacccataaaagggtttatttgctacccttcaagttgataataagggtttatttgctacccttcatgttgataatgcttatcgatttaaataaaattataattttttaaaaaataaatttaaccaatattttatattataaaatatataaaaaatttaacaatatactacctatagcaatattttgggacggaggaagtataattttattgaattattttttaaaaactaactgatatatatatatattaaaaatttatttatagttaaagattttaaaatttgatattagtgttgttctaaacatattatcaagttggagggagtaaatggtaggatacatggctcagggcctgtttagttcgcgaaatgaaaatttttggatgttacataggatgtttgaccggatgtcgggaggggttttcggacactaatgaaaaaactaatttcataactcgcttggaaactgcgagacgaatcttttgagcctaattaatccaccattagcacatgtgagttactgtagcacttatggttaatcatgactaattaggctcgaaagattcgtctcgcgatttcctccttaactgtacaattagtttttcttttaatctacatttaatacttcatacatgtgtccaaagatttgatgtgatgtttttgggatctaaacgaggcctcagtttacatccgttggctcttatatcgatatttacgtttatcaactattaaacagttcattttacccccttaaaggctgtgtttagttcacaccaaaattaaaagtttggttgaaattggaacgatgtgacggaaaagttaaaagtttgtgtgtgtagaaaagttttgatgtgatgaaaaagttggaagtttgaagaattattttggaactaaacacggcgtaaatcaaagtgattttcatccacatgatattaatgcagttgaccaaaccgtggtgttcacatgttgttgaccacctctttgatggttctcctccttatgtcctccatccctctttctatcccctctgagtagcgtcaatttaacgatacaggagatatgtaagcagtgtcaagttgaaagagttaaggcatgtttagttcacgaaaagaaactttttgaatgtcatattagatgtttgatcggatattgaaatgggtttttggacatgaatgaaaaaactaatttcataactcgtctggaaatcacgagacaaatcttttaagcctaattaaattcatcattagtatatgtgtgttactgtagcacttatggctaatcatggactaattaggctcaaaagattcgtctcgcaattttccccccaactgtgcaattagttttttttaatctatatttaatgctcatgcatgtgtcaaagattcgatgtgatgtttttgggaaaaattattggggaactaaaccaggccttacattgtgagaaagtttgtgttatgtcctttctctccttatgtcctgctgcgttcggcagcgttagattgtgagaaagtttgtttcgttttccgcacgtacgaactattaaatggtgtgttttttttaaaaaataatatacgaaagttactttaaaaaattatattaattcattttaaagtttaaaatagtttatactcaattaattatatgctaatagctcacctcgttttttactctcctctcctctcaaactcacccaggcaacaaaaacaaatacagtcgttgtgtgcgatgtcttgagctagaaacagaaaagcaacacgagcagtgccaagatgaagacagactatagagttgtcagttgaaccttacgtccgttaacttcgacaactggtgtagcccctcttttttatagttcccagcttgatttcacaaaatttagcaggcaaaatttgctactccatccgttttatattgcaagactttctagcattatccatatttatatgggtgtcaatgatatatatatgactatattcattgacacccatataaatatgggcaatgctaaaaagtcttacattatgaaacggatgaagtacaagacactaaaaaaagtgtaattagctgagagacaccgtaaaaacgtgacacggctgatgaacactataaaaattatgtaattatctgtaggatactggaagtaatattttataatttctggatcagaagaggtgattttttttttttgaaatggcaagattgcccctggcgctgctcctctcgaatcgctcgccctgtcacggaccgccgccctcgcgcgcagccacctcctacgcacccttagctcctgcaacatctcgggtccctcgacattgcattgcctcttcttcttgttccaaccaaccaaaaggcaaaggccaaatcttcttcttcctccattgcttcagctcatccgctccaatcacctaaatttacagaaggcgacttggcaagaggatgcggaggagagatagatataggtagtgtgatactagcttgaaaaggagggattttttgttgttgttggatatttggagagtgaggagatgccgactggtgcgatgaagaggctgttcgttgaattgttgtaggcgtcgaactccggcagggaggcgacggtgctgtgcgcgcctcggccgcggaggatccagatccacccctgcagcgctgacctcatcctcagccctcctcacttcctcctcacctccaacaccaccaacaaggtgagatttctctctcaaatctgaaacataaatcatctctttcctctcttttttttatgtttgttcttgcaaaaaaaaagtagaaaaacttgttcttgatgtgttttctcttttgttcttgattttttttctccttgtattgttctcggtgcctggggcaatcgtgagcaggaggtggccgcgcacaaggcagcagcgccggtgcttcgtgacagggcgagcgagccggagaggagcagcgctaggggcaatctcgctatttcaaaaaaattctcacctcttctgactcagaaattataaaatattatctccagtgttctacagctaattaaataattttttagtgtccattagccgtgtcaattacacatttttttagtgtcccattgcaaattttgccaatttagtatgactcttcacaagaatgcgaaattcgaatctcaaataatccttctcaaggtgttagcaagattgcaagaaactgttcctaattgattggtgagttgaaatgatacaattcgatgaattatttcttattatattcatcaggctattagggagcaatcagtacgtatgggcgtagaactacatggcaaattggtaattagaaaatagaaaggcgtggacttgtacatccaagcatgcatgaacagaagattagctaatgagaacgaaactacaaggcgggttagttgattctatgattttgtcagtaccaagtataacacataccttctatacatgagttcgtggtatacgagaataccatatacctaatggaatatgagaaggcatcctttgattaagtaaatacagcggataaaaaaaaagtatcttcccaaaacagaatgtgttagagtcgtaatcagggaagataaggtctccttagttcgtatcatgttctattttttccaacttctacttggagagtaataaatgatgatcttcgttataaatacaagacgccatagaaggagaggggaccgactaagacaaggagagggacagactaagacagaagacaagcaaatacagatctaaacaaacccaatatagaagccacaaagaccagcatgagggatagctacctccaatctcactgagttcatgtttgagaaagaagactacactgtagcgccgactacgtgtgagagctccatgccgtcaagctgacagagattaaattaggtcatcccaaatcttctactcttgagatgagatactgatatataaaagcaatactggctttgcccaaaaggagtataactattacctgtcatttaaggggcccgaacctgtataaaaatccatgtctctcatctcttttacctcaatatcgcgtatactctgttccaactatccccacactctacaaataccatatatggatatatctttgttaacaggtttacccaaaatatggcagatttgaagatttcaataatactacacatacgttaaatgccaactggaaataattaatctccggttgtcaggtttttaatcttgatttttgatatatgacttgtagacaataatattttcaacttcgcagaaatttattttttggatgacagtatgagcatgttcaatcttcaatttgttcactttgtgaattttggcacattttattattaccaatttttgataacgttggacgtgtttgctttgcaacctttctaaatttcggctgtgtttttatgaaaataaacttaaataacatactaaaatttgataaggtgaagatggaaaaagtataggaagtcaaacttgttgtaccaaaatgttacaagcttcttaaataggcctacaaatcagaaaattaggcgttgctttattactcgtagaagaatgtttcactactagtttagcacatgtttgagactactaaaatcatgaaacatggttgaatcatggattgaaacactttcttctaatacatgaaacatcaagcttccactgctgaaacgtcaacaaatccacaataatcaaagagaaaaatggaaataccattaaaacatcacgatacattggctgaaacacaaaaaaaatatcacaaaatataccaattagatctagcttcttcctcccctccaatggcgtgctctagactatgtgacaatgagtggcagcggcaaaggggtagtaggctgaatcagagatatccaatacttcaacaacctaagggttgtggagcccgatgaactccgacctaagcggaagggccaatcgtcgatgattgtgttgttggtggaggacaagaccggataaagggcgtcagtggtgacaaagcgggggcaatgtggctcgggggggaggggggtagcggtgttcctagtaaaggttgggggtgacgccatcctctcctggtgagtgtgtgagagagaaaagtgggcgtatgagaaagaagagagaaagggagtcaaggaggtaaacaactggttgggaagaagctcgatatttcgctatccattgagcacacgatagctggcgttctcgtagtaatttagcactatttgatttgctaccaaatttactaaaatgccggtaatacaaaaacttatctatgttggcattgctcttattagagcatccacaatatagggacactaaaggagatagaagaacaaaagaccggctcctatacgttgcatacaaaccttttgcatcggtactagccttggtgttcttttttcctaaagataaagatgaagattaagtttttacacaaaacgaggtggtattaacgtatgattgattgagttttaattattacaaacttgaaaatatattaatatgatattttagagcaactttcatatagaaaatttccgcacgatacgcaacgtttatcagtttgaaaagccacgaaaatcttaatcttcatccaactcttgtcagagaaaagaacatgaccttaaagaaagagaagaaacgatctcaagttaagcatcaggtgttctaaaaaaaaaaagctaagcaccaggtagcaaggatatattttaggtacacctagaaacatcagtcaatggaaagcaattttgcgagagaagatgctctactttttctagtttaatattccaaggtgatgggcatgcacaaccagggacactctatgggtgccctcactaactgagggcactttctggggaactcctcatacaatggaggatacccctggtggtccaatgagtgtccctaacccaaaaagcccatgtagctattttactatactacccctctcttatccccctctctcttcccctcatttactccatccgcctcctcctaccaactggcgcactcatctcatcttgtgctcgcctcctcccttcgcttctcgtgtcattgctgccaccggactccgacgcagctcttacccccgcagccgcctcctcctcccactccttgcgctcctcctccggctctgcgcaagcgcgcttgcgatcggggcacgaactctgatggcggatggcgggcgacgacggctgctgctggcggatacggagcgtgtcgagtgggtggtccgccagcatcccggccatgcctttgctcttcttcctctttgatctggatttgcttgctcttctttcttccttcccgatctggattttggatgtgggtctgtagtgcggcagtcaacgtgggttcccagtgtggctccgaattggccgatggcgactcgtcggcgggcgattcctccggcggctactccagctctgccaaggggtggaataggaatacgagctggggaatcgatatccacatgagcccgtcgccccccaatacgtctcttggctgcgtcgctcggccgaaaagtggcgagagacgcgtccctcagccgggggacacgctccatcgtggggagccggcgcggacggaaaagcggacgtccgtcggcgagggaacgacccagagacacgcatttgccaagagagatgctacactgtgaaatttttttaaatgagatgtttgcacatgtggtagagatgttagtaccttaaagtaaagggtattatacattgcggatcctatataaagcaaaattgcacgaggcctttggtcctttgctcctccgaaggaccacggttccctgcatggcacgtgttagaaacgaatctcaaagcaactggtctccgtatctcagtctctctcccttttttcctcctcccctgttcggtgcggcggccggcggcgagctcgtgcacatggaggcggcggcgcacgatggagatacctccttcccattaggctcggtggcaaggtttcgcgcatggatggtggggggaggcggggagcggtgagctcgcgcacatagggagcgttgcggcggcggcgtgagcgtcagcttccatagactcgctgagttgtccgtcttctcgctgattccctccggccggcgttggtgccattccccgtggcagcgggctcccatggcgctcaccaaactggtgcggcggcgcaattgctggagcacgcggatgggttcatgggtccccgggtgtcgggaaatgctggctggggccatccatttattatttattattgttattattattgttaagtctactacattccaatatgcctccattaatggttacacatatagcataaatagcacagattgttcattccagtgttgttgaggagctttatttattatacacatgcctctgagcataacttcttttttttcctcttcttgcagaactcttggaaatcaacggaattcagtaggatctgtgagtagtttgactgttgaattaatgaattgtagatgcagtctcttttgtctaatataagtagcacataatccatatttagatgttttatttctttcatgtcagcaatgcatgtttgctagcacttattttcttgttatcagaaaggaaacaaatggcattccataattccattacattgttagcgcgccatgctggacatagtttttctaacaattgatcatggtgcttttttatttctctctgaaatctgatgagctactcctacaatacatggcctgtttaagtttgtgctgacaaaacatagaactgccaaatatagttatctgcacgacatagaaagtgagatcagcaatacaccacttttagtttcaggtgacaagttttatgcaatacaacatttgaaatcttcctattcttcactgattcaatctctttgatggaataagttcaacaatagccctatttgaccttaatccaaaatgatcttccttattttttagtaagatgaaaacatctgtgtcggttttgtgaattattgttctgatgcccaaaatagttggaaatgcactgaaaacaactgtctctcgttttttttttcttgacatccattcttattcaatccattggagacttcaggcttcttaattctttggtattgctttggtagattgaccgaatatggtcacaaatgcaaaggtgtgaatgggctaaatgaggtttcttgtgcaaattagaagaggcagtaaatcttgttatattgctaactctatcttagtgacgacctgcatggtaatatattgggttcatccttaaaaatataatattttaactcttctatcatttaaaaggttatttaccattttttttccatttcttaacaagtagtattcctgaaatttcaaattattcctgcaagcattaatttaccattttgaaaagattacaaatcttttttggccctgacaatgctagatataatgggaaattacattatcatctatcggattagcgcttttaactttcctgcttttatgatgcttaattttgtgatgttccatattaagtgcagcagaagactctattgaattatagtgtaagggcagactggaaaaattaaatttacataaaaaaattcattttaatcacaaagttattcaacatgctccaatgtaatagaactgattttctgtagacctatgtgcatgggcatactactggtcttccaaaagattgaatggtgaaaattgaaatacactttagattaggtttgagtacagcatattacttgtttaatttgccttgggcatgtactgctcactttctatgcaatattagcgaggaaaaaaattatctagaggtatgctcaatttatttttagtttgtgatattggagtgcggagtgttacctgtaaacccatgtccaaatttttttgcggagtcagacaccctgagtcctagtcggattccgacacctgtgtcagactctaagaagaatttcgcgtgtccaattctttatgatgaatcagacatgtgagtcagagtcagattctgacagtccatgtaacactggtatctaccacactgccagtgcggtagatttggttcaagcatgctttcagtctatagatatcggtgcttatgggtcaaatactaggtcatgaaaatcatcctgggagtagcctaggttgccccttgctcagagaattagagagcctaattatatagccaaattcatatggaattcgaaatttatttattttttcttgagttacagaaagtaggcaagaaaatattttattgaatatggcagggtttagctcaatatatttgtccaggaaaccacctgttttcttttgcagatatgcatgtactgatgtacagttgactttaagcttgcatgagctgcaaagactaactttttttgacgaaaactgcagatactagcttgaaaagttctcatttttcaatgcacacaacaattggaactagtccagtccacaataattcatgattgcatgcatacatattcaggaatcaaaatggtaggtacttcgcaaaagatgaaaagaaggctggttgctactgttgtgtcagtttctcaacctcattctcactctcaacctgacatggccgtctcaaatctccctatcaaggccatgaccttgctctttctctcctctgtaggtttgctcctaccctcctctttcatttcattgctctttccatcatccttgctccatccctgaactggctttagtgtcttctttggtggcactaccatctccacattttcttcagcctcttccttttctattagcataggttcaagggcatcttctgtatacttcgttgtattgacatctttgtataactcagattcactgacaacttcatttagttcggtttcatcaacagcttcttttaactctgtttcattggcagcctccttcaactcactgttatcaatggcttccttcacggcctgtactttgctattgatgccaatatcagcattatccctgccgttaaaactgttgttgtctggcacttgatgtttctcttctgaaataagctctacaacttcttcatttttgtcttcctgttggttagaggctggctcacttggattatctccaaatagtaaatacgcaatgacatcaacctgtttcagctcgacagggtcagggagccgttcttgcaagtgttcctctatggaaggcgtgcttatgctttccatctcatcaaattccattaacaactcaacttcttgctcattgactttgggtgcctctatcggtcttgatggtatacttgttctctggatagaaggaacagaatttgctacccccattgttttcttcgttgttgtgccaggagcacgaaccgaaggcaccgcttgagtttttccacctgccagagctcctggggttgctttctgtgttctctgctttgcagatgatgctgccatcttatcaacacctggccttgaagagaggttactcttttgcatagcggatgatgattttgctgtcctgttcatatccttagatgaacggttacgtgctgtaagggctggaggccacacggatgagccaccagacttgtcagcttttcctttcgttgtgttggctggctttgcagtagtcgtggacgatgaagtctgcggtgccttgctgctgtgaatggatgaagaagctgagccaaatgtcgaccgggatgttcctgtgcgggtgctgaacgatgatgaaggccgataggcgttggatgagcttgcatcatgggatggggataatttgcgatcgggagagcttgggacagacctcgctcgtcgaagcccctttgcaggatcagtgggtttgattcctgtggacatagcccggatggtcctgttgttcctagcatcaggttccctccttgatgttgccattgtggacagacttttctgccatcaaccaaaaaggcataagttcgacggagctgttgatattgtctgtcaattgaggtgctggcactcagttataaagcaaccgttctgatcttatgaactagatatgcaaagcacggcacgtaacgtacagtaattcagccagacgactagcaatctacaactggtaagaaaattgaatgtcatgcacgcagtttttatctaagagagtagtgaatatgagatgaaatggaggcttaatcactatgctaggctttacacattggatgacacaatttctttttacttttcagaatgcttccttatgaaacaaatgctctacagatgcaagaaagattttaggaaattccccatggagatcaaaactatttgctgccatttctgccaaacgaaaatgctgaaaccatacctggattgatctcgtagcagctcagaaaagttccaaagattgatcaacctctgtgcaattcatggccagatgagctaggtagtttcttaggtgtggagatggagggtggaagtttgcatggctgatgctccacattttatggtctgcctctagtggttttggtcgttttgtgtgttgaaatagtcctaggaactgtgccggtggacagggcattctgatcgtctggttcttgtgcttccatgggctgtaaatttgacaggagttccattaatagtgagaagggcttttaggaaggcatttcattagtcattgtctattaacggcaggtgttggttacttcgattcactatctacatgttgcatgtttggcaaaccatcctcagattcaatattgacctgcaagtctgtaagagtttatgctaaggaatatttgatccaatgtgccatggttctgagatatttgtactgattggagttggattttgttcagtacctgatcctgatgtgatgaatacagcaagcatctaatcttacttcttttctcttcaaattgaaggagggataagtgttttaactgaatatttccttaaagtggtgtataaacactgcaaggacatgaacagaatatgtaaaaatggctcaatgcgttgctaactggaatgtggattagtaatccatctctacattgataagatataacatcacatcacttaacatgccatatatttctttgattctttccctgttgggtacttggagtgtatttgctaggtaatgcaccacagacttcttatatgggaatagttcatattgttatcggctctctttcacatcatgaactatttacagttctccggtttattttcaatgcgggtcgaacctatggttaccggatggttgaatgctattaacgagaataggaattcgcttttcttaacaataggacttggagatttttttggttcatcatgctatggctttaggtttgcatacagctacatttgattttagtaaagggtgctttagatgcatgtgattccaaaataatgcaccaatatttggcaccaaggacatcgtcgtcatatcaataggaacatccggtgttaaaaataatttgagacagagttcagtttgctgaaaaatcagaccttctataggtttttatttcggaacttctgattgataatctttcatttgatttattttaatcaaacaaagagctcgactcgaaaaaccgacctcctaatggcacaagaatttctaccttggtatcagaactttctatccaaatcggttctacgactattggaaaagatttaagttggttttaagatagatttgagtccaacttttgaaatgtcaacccagattcgaagcaagagcaccctcctatacaaataagcaaggcaagaagctaacagagctcttttttgtggtatcagagtgcatcaattgattggtggtagaaaactaaaaacataatattccaataagaactggttaactaaatttttgtcaacaaatttacgccaacttctaatctactacgtatttcttaattttatctgtagattaaaaagatttgccattatccttttgggttttacgagcattaatattccatcttttccaaatagttggaatgttaaaaaacataatcctgtgctagcaatgccattgatatgaaaaaatggtctcactcatctcattttactctgtttatagtctcatgttcagttactaattcaaaacagagaaacaaacaaccagttattgcgccttcgcttggataatgatatactccctccgtttcgaaatgtttgacgtcgttgacttttttaaacatgtttgactgttcgtcttattcaaaaaatttaaataattattaattcttttcctatcatttgattcattgttaaatatatttttatgtaggtatataattttacatatttcataaaagtttttgaataagacgaacggtcaaacatatgctaaaaagtcaacggtgtcaaacatttcgaaacggagggagtatgtcccagctcaggtcaaccctgttgctgtgatattatatagtaagttgcatgcagcaatagattcaatccaaaaacttaaactgataagaaaaaaaaagaataattcactttgacaaatacctctctcggtaggtccaaaggacaatagaccctctttggcacaacttcagatcgaagatttcatagggctaggtattcctagctccatgaatccatggatatgaatctacgattgcgtgtataacatttagataaattaatgtgtttttattttagatgaagtttaaaattttaaactactataatttaacatacaaatatcaaatctatcgtgatcttatattgagttatgtcaaacaaagccttacgctctagctaagttgttcagtattcagatgctatgtatacttgtgtccagcttggtaagatgcttcgtcctcgggatgcttgatttcctcagggcaccagaagcagtagttccacggagaggtgatcaccggcggtggcggcggctctgtcacgtccttggcgccgccgacaccgcccactctgtcagccttattgtccagagagcggaacatgtcatatcaaaaaatttgacaacactaaatttttcttgcaaaatgcttacaaactcgttcactaatactagccacttaatcgtgctttgcacgactctgagcgttaacataacatacctatataatagaccattgatcctgacattaattaaaggtatcggtttcgtaagtacgttaatttctttgttctcaaatatactccattaattcctatatataagtatatctagtttgtttagtaagagtaagattaagattaaggaagattaaaattttgaactactccaattggctctttctaaacacctgagttggttaaaaatgcttagatatgcattgaaattagtgtcctagaaatgcttatttttctatgtaaaatttgaatcatagaaatacttattttgggaatgatgcagtagctagagatgtaaatggatgaatgctgtaattgattgacattaaaaagtaggcgaagaaactaaaaaatatatgactatgttggttaagttgagggagtggatgtagaaatagctatattttacgataatttttgaatgttaaaggcatctatattttagaacggagacagcaataacactgagtgctcccaagtgtatggtgtgcgtatgtgcgttcgtagggactgttttaaaataaaattggtacgtagtggatgctacttagttgatgtgtgttgctccaataccaagcaaaagtagtataacagagcatttacatgtacactctcatacatcatagatacaaacttacgactatggcgtcattattttccctttatttagtcaggagattaattaagcaaacaaatatatagtgttaaaaagactttttttaaatggtagtgttaaatagactaagcccatgagttatctgcttttttaggtctttagtctggaagcatccagattggtccaacgtgtttccactgttatagatgagcatgatgatccaacggtgcattttcatttagcagctcatccaacggtccataccattgtagatgatgtggctcatcctccattcagaaagcttgttgctttcatatatttagatacaattataactttgctatttatcagccatctgatttttttttcagtccattttatagtcacctaaatttgcacaagttattttcgggactttcacgagcgatatactaaaaactcacaatataaaaaacacaactttagtacaaagtgcaacttttagtttttttattttctaaattaatctagatgcattgttacacttacgtaaatcataatttttagtttcatactagtacgaatttacaccaaatcatacatttttattgaacttttatgttttttcttgagaggattattaacttttatgttagaacactgtttgcttcaccacaagaaaaaaaaagtatagtgtgtgagttattgatattgatctggtgttaaaaatgtgattaatagataagagtcggcacttgacaaatagacgccccatagaattagcacgaaagtcacttacctgaaatgcacaaatttgcacctgtatctcaaaaatatatactaattaaatcacataatgtagcaatggtagtggatactctataaagcacacaaaaacttaacaccaatgaacatgaacttgggccaaacaagatggctctaaaacatctgcccgacattcaactttccaggggttgcataaccttctagctttctccatgcaaagtcgccaatcttgttcccggtaagtcccaacgaatcttgttgagatgactcgtctgtctccttgagcatcatgtctacagagaccatgcccttggctggtccatccagtgctctcatactaccttcataggagagaaaatccaagacttcttttctgtttccatttttatagacaagagctatgccatcagcaggtccattttggagagtgatgaatgctgtgtagatcaaataactagaactagaactgctttcagcaacactgaagccatccttgtcatctagattcagagaattgtacattcgcccgtttgctccattatacagtatgagcgtaagatcttttgcatctaatgacgtgcgtaccgctaactcaacaaactgaaaagaaaagaaacccatattagttttgtacttttgttcaagaatgaatttatggataagatgatgaaataagatgggatttactgatatagatccatatcaatttagtaattcctccatcccaaaatgtaacaacatttcgggacggaggaaagagggagtatgtgatatactatgtattggagtttgagctcatattatcttaaagctgattgtgacctcacactgtagttaaccttagaaattaatcagctttaagctaatatgagctcaggactatattgtgaggtcaggactatattgtagttaacctttctgcaattatggtaaaataatgcacatattgaactatattgaaaatttattgacgtctgccagtgtgcaaaatttacttaacatatgcaagtaaactgttaatagcataggaaacccaagaaaaaaataatagcagaaaacagtgaagcagcggatttcgtacctcattctcatctttgcctttgttttcatagtggaactcatttacccaagcctctggaaatgttctgaccgaacttgaactctcaccaagggaattcccccatataagatttgcatattctggatggtcaacgaaagggtttcgattatgctggtacaggctgcaaactcgattgttcctaagctgctctgaccttgatggcggatcaagttcattccactttaggagagctgataggagacccatttttctgctttcttaaatacgaaacagaattatcacattagtttcgatccaatgttactaattgcaatataattataacagtacaaatgtaatatcaataattagtgtggtgtgcatattacattataaccagatctaatgtagtattttttttactgtgttaatgtatcaatcattacttctgttggatatcagataggaaggatccgtcattttaggttccccctcttttagcattccatctaggattagagctgtgtacttggtaataataggttgggcacattatgaaacaaatgaaaaaaagatttagagtaggaggaagcccgccacaattagaatgaaaaatatgacctgatttgtcagccttaacaaagcgagaaacattccaattggtaatgatgggataccctttctgtcgtatttatgtaagcttttgtgatttggaaatcttgggctccaggcaagtgccattttttctcttatggttagtggctcatgacaggtgctggaccgctgaccatcttacacgccacggtcttccacatccagcccgttgtcctctttgtgatcaagaagaagaaacaatcaatcatttgctcatctcatctcatgcattttcgctcatgttttctggtttaaccttcttcaaaaagttgggctacaaactctttcgctgcagcgagatattgcttcctttgatgactggtgagcaagtgtagaagtaagggtggatggtaaggttagaaaagggattatttctattgttgttttgggatcctagacattatggaaacattggaatcattgtgtcttcgatggcgcctctcccaacctagatgaagccttgctgcttgctagagaagagttgtatgactggggtttggccggggctaaggacattcttgccctcataccgaacggtgaatagtgtttgcttgtattaggctgaggttgtcttttagtgccttttctggcgctcatgtaagcaagtttgttgtgtgtgttgtaagggttcttaccttctcctttctttttcttaatacaatgatacgcagctctcctacatgttcgagagaaaaaaaaactttgtggaattacagatcatgaaagaggcttgcatgcaagctacatgattagtacaacggactttagccaaacagtggtgctttggtaaaagaatatataaacatcatttgcaagattaatatctgttgccattaggtgtctgatgataagcaaaattttgttttgactaatattcagagcagaaaaaaatagctatgcaacaataagtcaaaaggaaacgggaaagaaaagaatatccgaagataacatgatactccatatgaattttatatttttcatccctccaactctttacaatttaaattgaaattttgaaggtgaggcaatattccgtggactatttcctctcctgttcatggtttttccattttgatttggtggccagaagccaatatcataaataccttcggttttgaggaactacttacgaatacttggtgaatcagaaagttccaaatgtggtgctccatctttctggtcagatccatagcttactgccatgtacatcagggccctagatacatctccacgcacctgaagaaatcaaacactcaaatgtgataagcactaaaacctaaaaactatagtctctgttcatatctgtaactggaaagtactattgctggtgttcatgtactattcaacacaagtatcacttctcattgcagctattagctcagtatgatttgtacaacgatttttcattgaaaattatgcacctcatacgaattaaacataagtaaaattcttatttcctgaagctaagtgcactgcatacttagtaactttctgaaatagcatgtgcctacgatttgcaccacaattatctgcacctttaaaggaggtgcccatctttcactatctgtctctgtgtcaggtgcagcttcatgatttgcaggtctcatacatcttactgatgtggcagcacaatgtccataatacttgtttccccttgatgagtttactgaaaacataattttcatttttaaaaaacctattaaatatgttcagaaaattatatagaacatccattataattcctttctgttgcaatggttttggccaaaaattcagaatagtacgaagttcgaacttcaaacaatgcaaagtagcattcaatcaatgtcatcagcgaaagacacggaatttacaatttatggttaacatgataaaagcagtatagtaatgttccaagatgacaagattgaatttcctctagtagactagtagtgggtagtgagaggatatgatgcccatcattggagagttatactcatagagaaatactgtgttacaaaaatcaacttgccattgacatctgcagggcgaatattgtgcagatcagtcagcgaaggcccatatgttaagccatatgatcgaggccataggtgttctcctgcacagcaaaatgtacaatgttgctaccgaagaaaagcacacacatcctgtgtcctgacatgtgaatcaaaagaacttcagaaatgtgactcactgttccatccgtccggcttgcctgccaagttcttcggcacagctctctgcgagtatatctcaatcctacagaacaataattgtctaaatcaattcataaatatagctaacatttggcaatgtattatgtatgtcgcataagcaattaagcattgcatcgaatataaactgttacagagcatcatacacgtcaagggacgcctctggtttgggtgcatcagctgcatcaagaatcttgagtgcctcccacacctactaaacaatgtgcagcagcagcaacaacaacaaaagattattaatttctttctcaactgttcttgtttgcactccatgattccatcaagaattaccaccaaattaggagcaataataaacatggttgctgaaggcaaacaaacccacatccttataacgcagcgcggcgtgaggcgaaacgacggcgcggagcttcgccatgagctcgtcgccggcgaggccgtctaggcccgcgtaatacctccctacatcttcgcaggggtacggcggcgcttccggattccgacgacgctcgccgacgggggaggaggcagcacgggcaggggcagcagggaggaggagcgacggcggcggaggagacagcgacagagagagcgcgagcgcggcgacgaagagcgcgcggaggcaccggtccagccacaggcgggagggccgcccggggatgatgcggttcttgctggggaggggtgggcctgggccgcgggccacggcgcgggagcgggagcggcgcccgggtcttgccggcggcggaggtgctcccatggcgggagaggggaagatgagggaggcggggaagggaggcattctctcgccgtctcgccggcggccggcggcgaagcagtggccactggccagtgtgggctaccggccacaaagctctttgtgatccattcatgatttccctcctactgtgggtacttgcagcggcctgaataccggaccgtcggattgatgatcagacggctggttttgtttttacttatcaagcagagccttttaagggctgctttgaaacaaaagaaaagtggagatcttttttttttttggcaggattgaaatcctatggaaaattgtccaacgtgctcctttagaagaagaacaaaggaaagattgagcatttgagtcttgagatgaggatttttaacacggcgctgctatacatacgataatgtgttacgataattgtacgataaaacggtctcttctaaactcagcgtttattaacgtcacaagtcctggtcccacacggaaccttttctaggctcatagtatttattaatctatttttcctaatcaatcttatatatactagttgtttcgcacaacacttatcgtgttaccctgttttggttaagtaaattatgatgacgtgaacctagtttaagtaaattacccatacaaatatgttacttgcaccttggaccatggtataacatcacccctagttgaaagtatgctaaatttccaatgatacaaatcaggacaagatgcagcaacgttcatgtatgaacctatgtttgacaaggtttgtaatatttgcttggatacagagaaaaaaggcatagaaaaattatgagtatgtatgtgcgtatgggcttcgggtccacgaactcttgggctccagcatacgcgtgcaccaacgttacgtaccaggcgccgtcctcgtttgatcgtttgatcgtacaaaaatcgtaaaaaaacatcgcatgtgtagcattttcctttttaacacgaggttggatctcatggggaattttcttgggtctatcttcctaatatagaaaaacattttccctttgcaccatagaggttaaatacatgcgaaaatggtattgttttctttgttctttccacaaaattttagtcgaccaaatttgtactagtgcatcatgtaataagtgcttttagtgtaaattaatgtttgtcttgactaatggaaaatggttagttcataaatgttgaagataagtaagaatgtattaagagtaaatttcacaagactacattcactttgatcaaactatcgtaaaactacaaatttatggtggtgtatcacaaaactgcaaatttataactaaatttatcaaagaactacatatttaagatagaagatcgccaaactacatgtttaataataaaattatcgtaaatctacatgttttgcatcaactgtaagtacatagctacaacatttataagtcttagcataatagtagtggtacatatttaaactatataatctatagttttgtgataactcgagtactaaagttgtaggtttgtgatacttggttttaaatttgtagttttgtgataaatcttatgctaaatctgtagttttatgatacaacactttaaatatgtagttttgtgataatttgatcaaagtacctatagtttttgaaatttactcaagtaaaaaatattgattttaaaccacaaaagggtaaaaagatttgcttgtttgcaatcataatagattgaaaatgctataaaaaagtatatcctataattttgcatttggaattgtccaacggcaatgaaaacaaaatcatctactatgtacaatctggtatcaacatcttctactcattttattttattaagaaatttgtgacatttcaatgattacacaatttgatatagatgatcaatacaataatatcaacttcttatattcaaaacttctgctccactctttggaaaaaaaacttttgcttcattctctaagaaaatcttgtgttcaattggaatagccaaagcatttcaatacttatgccaacgaattattttcttttattaagaatcttttgacatttcaatgattccataatttggtacagatgatcaacacaagaataacaacttcttatattcaaaacttctgttcaaattatttgggataaaaaacttgtgtttcattctctaagaaaatcatgtgttcaactgaaaatagtcaaaccattttcaattcttatgtaaaaagttataaaccaaaacaaaacttaagcaaaccaactatagaaacagttataaaaattttaaaaatagtcaaagcatttccatacttatgtcaataaaaatagttattaaaaataaaaataatttcaatacatatggcaaattataaaacaaaacaaaacttgtccaaaccaactgtaaaaacagttattaaaaataaaaaaatgttcaattgaaactagtcgaaccattttcaatacttatgtaaaaaattacaaaacaaaacaaaacttatgcaatccaactataaaaaacagttataaaaattttaaaaatagtcaaagcatttccatacttatgtcaataaaaacacttattaaaaataaaaataatttcaacacttatgtcaacaaactataaaacaaaacaaaacttgtccaaaccaactaaataaaaacagttattaaaaataaaaaagaatttcaatacttatgtcaacaaattataaaacaaaacaaaacttgtccaaaccaactataaaaataaaaagaatttcaatacttatgtcaacaaattataaaacaaaacaaaactatccaaactaactataaaaacagttattaaagacaaactgaacttgtccaagccaactataaaaataaaaacaaagtacaaaaaaaaaattaaaaacagttattaaaaacaaaaccaaacttgtccaagccaactatataaaaataaaaaacaaactacaaaaaaaaaataaaaacagttattaaagacaaaactaaacttgtccaagccaactataaaaataaaaaacaaactaaaagaaaatgatataaaaaacaaactaaaagaaaatgatagtgtggctgctgggattcgagcccaggtctctacggccacaacgtagaattctcaccactaaactacagccacatttgtgccaaacgttagctataaattatattaatcttatgtacagccagacccttttttttttctttgcttcgagccgaaggagacgaagagtcaaaaacccgggtcagtcagactcagaacccctcctcgacctcgatcttccactcccccacccacgccgccgacgatgccacagcagcacccacagccgccggccggctcgcgcctcctcgacgccgtcccgctcttcgtcgtcgtcctcctcgccgcccacgtcctagccctcgtacgcacgcggtccacttccccccgcgcttctctttgccccaatccgatctgcttaccccctaccttcgtcgcgtgatccgtcgtctgaccccccgcgcgggactcttccctcccgccgcgcttgttgcaggtgtactggatgtacaggttagcctcggacaagcagccgccgcggaggaagacgcagtagccaccaccaccacgggccccgacggcttcgtgctcgcctttgtgtagccggtgaggttctttcctgcgatttcctgccctttgtatggattgcaatgctatggccgtgcgaaatacggatcggtttgtagggtttctatgatttgcttgatcaggggtttctttgatcataaggggcaaacttcttggactagctgatgataaggatagttacttaaactgtatcgagatgtgaaaaacagctgctattgtaaaagaccaattgcaagtttgcaaccaatttggggatctagctaattaatttatcataagttcagtagccaatctacttataaccacttctctacagtcattgaagcattagccttttggtacacttgtacaggaaagaaagatgggtaaatcattgttaacttgagtttgctgttagctgggcttgtattactgaagtatcgtaatcagctcactagacggcatcacggtgctggagccaagattttgacaatggggtctcaggcttagttaactgttgagttggcagtgtagggctatgggggtactgaccttgggattttaggcgtcagcacaggctcactgtgttgctgcggaatctgtgtgttccgctgagcgacgtatagaggggaaacggggatcgattcgatgactggatgcattgatgcagctagctagttaggagagctaacatacctcatggactgtgggctgcaggttgaggtgatgatggtcatttttctgtcatgggcttctcgtcgagcaaagtttgtatacacttctgtagtaatatgggtatataatggaatactgccgaatattttgaaattgttctacttgcacttttgagataatgatccactgaattgtgatctgttggagacaatccagataatttctcttctggcgtcactagttctgattctgttctggttaatttaaatgaatgaatgtggatacatattatcttgtaaaatcttctttggtttgtggtatttctggttgtataatgagtccctcggtggaaaacagaaaagagttcataggtgagtccattgcacatgtaggagagggtgtcaagcaagcctaaatcacactggatatgccatttaaattcgtgtgggatgtataccaactgtgaaaagaactcgagctcatgtttcttaagtaaacagcctacacaatccaaggaccaaaggtgctagtacaaaattgaaatcggcgtgcttagaaatactccctccgtcattaacatcaatatgaatggaaatgctagaatgacttacattgtgaaacggaggagtaacatttgttgatacgtatttccattttttttttccattgagttatttgttgctctttgctgcttttgcttttttactctacccctttctctgttaaaagttctattttgtggatagtgtaatagccaatctaaataaccttttaactttgtgccaatcacattgtcattttgcttattctttcttttctttcttgcagatcaaatcgtgagctgcgtgagcaagattttacctctagaaagcttaggttgttcattattgttgcagagtttgtgtttccgtttgttttatggtaccagtgacatttggtatataatcaagaagaattagtggaggacttgttgtatgaattgccttgggttctttttaatatgagaattccataattgttctgtgacagggagtcgtcagtggctttacttgtttctcacaaatcaattaccagactcttgatcgattaaaccgttcagttcaaactactcaatttttaggcagtacagactctatttgaaatgggagtttactctcttctatggaaaatcattcgctgtttacgattggtccatccatccagtcgaagcatgaggcaagagttgtcaaggtattggtcaagctaactgtaggatcgaatcacaagaactaagccaaccagagaaggggtgaatggttggtatacccaaaaaccgaaaacttttagttggaataaaagttaccctcgaaatcgacggagatcggtctgaccgaagttgatctgccggtctgaccgagtggatgccgctggtctgaccggtgttgaacctccggtctgaccgccgaagtcgcctgccgtgcctgtcgccgccgctggtctgaccgcccatatgccgccggtctgaccgccgcttgccgccggtcagatcgccggttagaccgccgaaacccggtaaacacaaatcgaagaactcttaaagtggatgacgactttattgattctctctgtgtttacaaagtgcaccaacagcactccttacaaaaatttcgactaaactcgaaaccctaactcaaaactcaactcaattgctctctaaagcgataccgggaagcctcacgctccccctctatttatacatgaggtaggcagcccaaagccacgaaccaaactcatactaggagtcctaaacaccttaggaaacccactagtacaagaaagaaactttacataaccaattgtaccaaatttgaactccttccaaatttaactccgcatcccatacacacacaataactccatcgtatgccatatgaaatctccatcaaccacgtgcatcaactctagcctaagtatcccgcatgatctctgaccaccacggacgtcgtcttatccccaagccgactcccggtccatcaccgcaaatactctcccaagacatcgagtcacctacacatggaacaaacaaagaaaccatattccgataccaagctatctccaacttgactcattagcagcaaacaatagtattacatacgtatagtatccatctagaagtcataatcacgaaataaactcggatatccaaataaacaacccgaaaccgaaaccgacacagtgtcggccggtcagaccgcgggctggccggtttgaccgcgcgcatactgccggtctgaccggctaccagagcccggtctgaccggtccacataaaatgataacctgtagattcacctgtgaaatccgatcatctccaaaaccacttcgtgaataaattccaaataacaaaaccgataatctccaatgcccaattgttcatcacagaataataatcaaaaacacctttgattttacaatctcccccttgatgaacacattgacaaactcataaaaatgttttggtgttaggaaaaagtaaaaacaaaagtggtaaaaagcacacttcgtacaaatatacacatcgtgctaaaaaatccaaaagaaaacttctccccctttttaaaagaaggaaattcccaattgaaccaaaaacatgctcttctcaaaaactctccaaaaattcaccaaaattttttcatattccttctcccccttttgacaatgatctcatcaagcataggaattatgttcattaatgttcaagagcttagcatacatatagcatatcatgtcatgtgttgcaataaaaagaagataaacccatctataacagaacaagcatgcattaaagtataaccatgaaccaaagatttttacaattaagcttgaatcaacaatcaaaattcatgatttcatacaatttataatacaacatcttaacaagcacataggttgaagaataaacactaaacacatatacttattgcatttatcactctttctcaaataacctttagcacaaaataaccaagagaattttttagtaactttttcttttctggagcctttttgttcatatttttctcttttattctgggtacgtccctgtcgtcaagattgtttacagggattcggcacccattattttgcttacatcgaatacgtccttgtcgtcaagactgtttctaaggattcgatattcattttttcatatttttattctctatttcacaatgagcaattaaagctatttgaggaataacaagtcaataaagcatatatatagagcatttataaaacaaaccatatgctagcatcaacattgcatattttcttaattcaagtagaattttgatgtcatgcatcatctcccttaaaagcaaaatctaaatctcatgaaaagactagaatacatacaagctatgctagagacaaataaaccttcaaagtattgctagcatgcacaagaaaataccatatacataaacaaagctctcttttctcaatttttctcattgtcatattgttgcttgataaaaccatgaggtacaaactccccctcaaaccatgccaaaaagatgaattatttccaattcaccacgaagaaaagcaaaacgattaggatccaaatgtttagtgaaaatatcaacaatctgtgaacaacaactagcagcagcaacatattcagattcagcagttgattgagtaactctagattgtttcctagaagaccatgcaatcaatgatgtaccaagaaaatgacatgttccactagtacttttcctatcaattctacaacctccaaaatcagcatcggaatatccacttaagcatatagaagatgaagtagaataccaaattccaaactcaagtgtatgattcaaatacctcattattcgcttgaccgcttgacgatgtgaagcacgaggagaagcttgaaagcgcgcacacaaatacacagcaaattgtatgtctagcctagaagcagttagatacaacaaagatccaatcatacttctatactccttttgatcaacagcttcactatcttcatcaggatccaacacagctgtagaaccaattggtgttgaaattggcttgcaattctccatcttgaaccgtctcaaaagatccttcatatacttcgttagtccccaaaataagtacacgatagccacgagtgtgtgcggggtaaccaagaaacaatacatcagtagaacgtgcctcaaacttatccaaatttccagatttcaagacaaagcacttgcaaccaaaaacacgcaaatgtgaaactttgggttaatgtccaaatcgaagttcataagaagtttttccaagtttagatctcaagaaaacccgatttgaaatataacaagcagtgttaattgcctcagcccaaaattttctaggagttttatagtcatccaacatcgttctagccatctcaaccaaaacacgattttttctttcaacaacaccgttttgttgaggaacacgaggagaagaaaattcatgttcaagacctctatcattgcaaaattgttcaaatgaagtatttttaaactcaccaccattatcacttcgaattcttttcaaagaaccaggaaattcaagatccaatcgaagaaacaaaccatgaaagtgttgaaaagcttcatccttagttgccataaagaaaacccaagaatatcaagaaaaatcgtcaacaataactaacacataccactttcctccaacagattgcactctagctagaccaacagtgtccatatgtaatagctgtcccggtgcatccgtcatcacagaaacaataggagcatgtgaagtagaaaccatcttagcatgacgacacggtgtacaaaccaaatcaagatctttcttaagtttaggcaaaccacgaacaagatccaaaccacttaaccgagtgagatgatcaaaaccaacatgtccaagtctatgatgccaaaacatcacatctttttcaaacttagcaaccaaacatgttatcacaggtgaaacaggattttcaaaatcagctttaaacactcttccataacgagaaatattcagcacagaatcaccacgagaatcaaaaactttacttccagttttcttaaattgaacttcaaactcttcatcaacaatttgtgaaaccgaaagcaaattgtactttaaatcctcaaccaaagctacattcttcaactcaaatttatcatttaccttaaccaaacctgtagcgagaacaacacttgtagcagcatcaccaaaaataatcgattcagtcttagatgccttctttagggaggagaaccaatttttatcaccggtcatgtgccgtgaacaaccggaatccacgatccacacgttctccttccttgccaccaaagcctacacacaagcagaagtcgaagcctcagtactggggttagaagataataaaaatttaagaatccagtactgagacacacgaccagaagatccaataggcatatatccatgtgcaaaatcaattttagaattttcagaaaaattcctccgaggccggtctgaccgaggtacagtggccggtctgaccgggggccggtctgaccgcctctgtaccgccggtctgaccggtgcccggtctgaccgaggctgttcagccggtctgaccggtcgccggtccgaccgcgggacccactgcggtctgaccggttttctcgagggaaaacccgatttttgccactttgattttgcaaaagcaatctctctctcctttttctgtttatgagctaatctgaaacaaaaaccagcaatatgtccatcttttccacaaaaagaacaagtatatttttcacgatgattagacacattggtagcattattagatttagcaacatgagcaacaacaggagattttgtatgcacaacattggattttgaagaagatgcactcatagtagacatgataccagcagatttaaacatagttttattaatatcaggtttaaccaaaatctcaccacttctagcaccaacacctaacacaacaggaggatgtctagaattgtgagcataaggattaaaacctaaaccacggttatatgtgctaacttttgattgatccaaaatcatgttgaggttctttttaccatcagaaaatcttagcaaagaatttttcaaataagaaacctctttttccaaattagtacaattttcacaatctaccatgacacctttgcttttacgacatttagggcaagaaagcacttcattatttttcacaacatcttccatgtactcaacacgacctaaggcatcttttagtttcatcttattcaaattacatgttgagcaatccaaaacatcaggaggttgttttaactttttagcagaaatcatgttaaacatcaaactagcatgaaaagcaacttgatatttttgcaacaactttttagttaaaaacaactcatccaaagtgcgtgtgtgcaaagcaaaactacaagcaagagaagatctatttttcaaatcatgtgcagcattaacatcactaatttttgaaatctcattcattaaaacctcacaattttcacaatcatcatcattaggaataagagattttaatctataatcaatttcagatttaagagattcaatgataaattcctgttttttatacatcttctcacactttttattttttgcactcaaaatattaatagcttcctcaaaagcactcacctcattatcttcatactttgtgtcagattcaccacgcgccatgaagcaaacatcggagacgttctttcccttatcatcatctccactttcaccatctacatcacttagtggctcgaaggcgacgcaaacttgttgaaaggccttcctaagattttccatcttcctcccttggtatgaacccttcgacttgttgttgttgggcttgttgttgttggtcttctcaccatctttgtcttctcttttgcctctcccaagcttaggacaatgcgaacgaagatgatcaattgaaccacattcaaagcaacaatttggaccacctcttttcctgttcctggcattattcatagctcgagcaattctgttaacaaccaaagccaaatcctcctcctcgatttgttcgagttgatcatcggatgtggcactaaacagtaagaaaagacgacttagatgaagaggcatcaacatctaaagaggaagaagaagaaaccaaagcactcgatttagaatcaattttgcgagaaagaacatttatctcatgtgttttcagtttagtataaagtgaatccaaagtcaaagtagacatgttaacagactcctgaatagatgtaactttcatctcccaaatagacatgtcgagaccattcaaaaagtgacgagaaatcttaaattgtggataattagcatcataagaagaatcaacagatctaagatcactcaaaattttattaaacctagaaagatagtcatccaaagcttctccgggtttcatctcaaatttaatgtactcctttttaaaaagatctcgacgaagctctttaatgttatttgttccttgatgaaaattactcaaggcaacccaaatctcatgagcagtttgaagatgagcaacacgatcataatcagagcgagaaataccactcaaatgaatgttgcgagctttgcaattttgttcaatagcagttttttcagcagcagtattaatagcttcaggaatcacataagcatgagaaacttttctccaaatatcataatcttcagccataatataagattgcatcctactacaccaatgagaaaaatccgtttcatcgaaaacatgaggcttagttgaaaacctagcgggagtagccatggcaaaaaactatagatcgataaaaatccaaagaagaaaacaaggctctgataccacttgtaggatcgaatcacaagaactaagccaactagaggggggggtgaatggttggtatacccaaaaaccaaaaacttttagaggaaataaaagttatcctcgaaatcgacggagatcggtctgaccgaagttgatctgccggtctgaccgagtggatgccgccagtctgaccggtgttgaacctccggtctgaccgtcgaagtcgcctgtcgccgccgccggtttgaccgccggtagatcgccggttagaccgccgaaacccggtaaacacaaatcgaagaactcttaaagtggatgacgactttattgattctctttgtgtttacaaagtgcaccaatagcactccttgcaaaaatttcgactaaactcgaaaccctaactcaaaactcaactcaattgctctctaaagcgataccgggaaacctcacgctccccctctatttatacatgaggtaggcagcccaaagccacgaaccaaactcatactaggagtcctaaacaccttaggaaacctactagtacaagaaagaatctttacataaccaatcgtatcaaatttgaattccttccaaatttaactccgcatcccatacgcacacaataactccatcgtatgccttatggaatctccatcaaccacgtgcatcaactctagcctaagtatcccgcatgatctctgaccaccacggacatcgtcttatccccaagccgactcccggtccatcaccgcaaatactctctcgagacatcgagtcacctacacatggaacaaacaaagaaaccatattccgagaccaagctatctccaacttgactcattagcagcaaacaatagtattacatacgtataggattcatcttgaagtcataatcacgaaataaactcggatatccaaataaacaacccgaaaccgaaaccgacacagtgtcgaccggttagactgcgggctggccggtctgaccgcgcgcataccaccggtctgaccagctaccagagcccggtctgaccggtccacataaaatgataacctgtagattcacctgtgaaatccgatcatctccaaaaccacttcgtaaataaattccaaataacaagaccgataatctccaatgcccaattgttcatcacagaataataatcaaaaacacctttgattttacactaacatatacggaaatcttgaatagaattatgaaaatggcctaaataacttcgttgccctatatttatggaaataatgagtcgataatgtacactctttgattaaaaaaactcgttttagaattctgtagtcaatctgagttaattttgatcataattattgttttgactatagcgtttggatataggtaaattacatggaataacatagccaagtttgatactgtataagaaaagcttctataatactcttattatactttttcgactatttaaaagatatgtaaaataattatgtaatcaaaattatgccttattgcctttgaaaattcaaacaatattcttttgtgactagatcaagccgtagtgtttatttggcaagaaaaaagtaaatataaaaagtcacctaggagttttaaaaaagcttttaattttttggcaggtaacttaatattttaaagatttgagaagacagatataacttatgttttgaatcgctggtatatcatactgttatgtatacacagattactcaaaattgttgtactgtcaaaaaaaaaaacaacaaaagatatcacctcacataaacacactggatcgctgtttcctccacgtggtgcattgtccttggctaatcacggtcaaactgcttcggtcaaacttcacgtccacgtaaaggaaccgtaaacatcagcccgttcgttcggccgaggcgcaccaccggccgggccggcctgctaatcctcgccgtcgaatcgcccccccacgcggcaccaggtaacccttccccgccgtccgatcgatccagccgtctccctcactcgcttttgactcgaaccagtccgctctctgaccggtgcgcgtcgcgtcgcgtcgcgcccctacaaacccgccctctcccgccgttctacgtttccccccattccgtttcacgcgcgagcgcgctacgatacacgacgcgtacgtacgtccagttcttggctaagcttcaattttgctttgcttgcttctcgccgcgatcgcgcgccatggcggatccgttcccggcggcggcgcgcggcggcgagcagggtggtggcaccgcggggcagctggtgtcgacgccgtccaggttgaggacggcggtggcgtccatgctcaaccgcaccggccacgcgcgcttccgccgcgccgcccccgtcgtcgtgcaggaggaggaggatgaggcggcggcggcggcgagggatgcggtcgtgcggtgtgacgggctcagcgcgtcggccagctcgtcgttcccgtcgtcggtgacgggggtcaccggcgatgggagcgtgtccaacgcccgcgcggtgctcccggcggcaggcgacggcgacaagccgccaccaatgcagtctgcttcagattatgcttctgatggccgcctcaaacgcagcagcgacgacgacggcgagcgctgccactgctccaagaaaaaacggtgattaaacacacacacctgcacggctgcaaggacttgatcgatttgctccaaaacgacattaacgattctgtgatgaacttgcaggaaggcgtcgtggagggcgaggcggcgcatccgcgtgccggcgatcagctcacggaacgccgacatcccggcggacgactattcgtggcgcaagtacggccagaagcccatcaaaggctcgccttatccacggtaacacatcgatttctgaatatctgaccgtgcgatggagagatattccgacggcggacactgactccacgtactatacgtacgttacatattgcagcgggtactacaagtgcagcacggtgcgcgggtgcccggcgcggaagcacgtggagcgcgaccccggcgagccggccatgctcatcgtcacctacgacggcgaccaccgccacggggaacccggccatcgacgtcccgatgaggcggcaacgacgacggagcacaggacgactgaccaaactactggaagattgctctagatagtagtgtctatgcatgtagactctataatctatatatagaaacaaactaatctaatcaattgaccgtttgaatattggttaatttcttagtgctctttcatgcacgtagtatttgccaattgccatgtacatcatatctagtttagactattgactgatgtgatatccatgtaattgatctgctacctccctcactctcttgattaagtatatgatggttgatattttcatggtttttaacgtgcaactttcaccatatcttttctattagaataagaaaaaaacaagacactgaaagtcatgcagcggcagcgccggtgaccttggcctcggcgagcagcgcggcagtggtgtgatgtgattaatgttctaattttgttcaagttgagattcctttgcttttttgctaccactgaatctgtatttctatgtgatttagtatatatgccacacggttaatttgaatatatgaattttcagtttctgtacttcaaacataattaattttgtgattcaagctttattgattcattctgagccggctagccggcttagtgttttttttttggctcagtccagttcgaaaaaaatttgttaatatactatatttttaataatttacgtttatatacagatttgtaaaaatatacttgccccgcgggacggaaacatggaactgcgatggtcccgcagctccaaaacgcgggaccgtcggtcccgtagaatggtcgcgtgggaccgtgacggtcccgcaggtacaaaatgcggcagcgaggcggcctgcgatttttatcgttgtttagctctgtttcaatactgtttgaaactatttgacaccgttcacacgcgcggtactgtaggttcacgcgcggtaccgtgctaaacaggccgcaacagtgccgaatagtgcaaacagtacccccaaacagtgttgaacagtgccaactcagtgaataaatcgctagccaacttgccccggcgttttgaaaccgcgggaccgtcgaggtaccgtgcgaccgttacgcgggaccgatgtccgcgttttggagctgcggaactgtcgcagtcccgcgtttctattctgcggaacgggtatatttttacgaatctgtcttggtatataaacataaattattaaaaaaataagtatattcgtaatttttttccgtatcaattctcacttctagcactgatgtgctccatatcatcagtgccacaagtgttgtacccggttgggaatctaacacaaatgaggattctcccaaccgacactggtgggaatttgtgtgcgttaaggtgtagcctcccgaacacagcaaacttatgaaagtacttctaaaaacagacctatacattctgttattattttttgttttgaaacaaagtagtataatcaaagcactatgtagacaacacatcagtctcaggttagccttacatagtatgaagccaccctctaaagtactccatcttttttaatatatgacgccgttgtttttaagataggtttcaccattcgttttatttaaaagaataatctatttaattgtgactaaaatcatacagtacgattcagacgacgagatagttgagtaaggaaatataaacctctttgccttgaaacaaataactctatatgggctggagaatttgggtttgagcccaaagcaccccaaaaaagagaactggtacaggtagccaccgagcagcgccgccgcatcgccgctctcgacgtcgcccccttcccgattcgattccgccttgccggcggctagggtttctcggctcctgctcctctccactcccctaccatggcggacgaagccaaccgagcggtgagtgagttgccgtcttgcgcccgtgccgccggatctcgccgcggcgagcaagggagcgtgcccttgtttgagtttcctagtggtttccgtcgcgctcgcggtagtggtggtggtcttctaactcccgtttgctttgccgcgctgcgtcgtgcaggctttcgtggagctgcagggtcggatgatcgacaccaccgggaagatcaagcaggtccgagctcgctgcccccccccctcccattcccctttccccgtggaactagctcgttcttgcatctaaacgtttattatcccatctctaatttatttggtgctccggtccttgttttgttccgtggactggggatgctttcgtagtgttcgtcctgtgccgtcgctagttgaatcttgtcgcgaatgatggtttttaggttgatctgttgacgatgtcgacgctttttttttttcgatgcatctacgaattgctgtgctacttcaaaagcttgtagctttgattttcagaggcgacacttcagtttgcggatgtagccttacttcatacgttttgtgcgcttgttaactcaaggccatgcgcatatttaactgcatcaaccagcaaaatgttccaacttttgggtctttttcatgtggaaaaactacaggagctttgatccttgccaaaataaagggctccgatttcggcatcaaagttgagatcccacaaaataattaagttcttatgtagttgattttggaaggaacatcttagctgatgaatggaataatgtgctaaattagtttcagttgatcttgatttaggatcattcaagggaagggaaaccagttggaaatcgtgtttgtttgcaaactgcaggtgaatatgccaaggttttcttgcatttggacttttggagttcttctggaccatgtatatcatgagatttttaatcaatcacgaagtattgtaatctatttgttgttatgctttgcaactcaaagtactagtttttctcttagtgcatactataactcttatcggccattggtttggtggtcgcagattcgggcccttattaatatgaactgttatggttttttttctcatttgtagttttagggccagataggtttgacccttcatacttttacttgactgccttgactggatatccaccacagttttccatgttgcatctaactcctatgtctctctatggtatatatcacataatttccagaaacaaagatttcctagataaggacaattgtcaatgtcagggtcaagctgctttggctttacttcaaattataattactctgttgagatatattgggtgtatttttacgttgctaaaactttatgcaagcaaaaaaaaatcatatatgtaacaaccatttcgccatattccatgtatttcttaatgagggaacaatagcgcgacacttttatcgtgaaatgcttttccttaatgaaagtgggaatggggtgcaacatcttctgttactcctacgtattttcttcacactatgatttcaattttctgttgccacaaagaaatgtataatatgatggttcatggctgtttagattattaaaatagaagttagctgtttgatgggcagaacattattactcagtcctgtaagtaattgttttttgcccttctgcaatataagaaaatgtttacaggtattttctagattgtaaataaggataaatggtttgaattattatttttttttttgcctttctgggtttcaatcattgtggatgttgtggtagctaggggtttgttttgtttcaagctttcttctatctatccatataggtttctgtgaaaccctgctccatgctttgtgagtgctgtcaatatgttggaagtttctttcaggaatttccttcgtaacgcatctcatggatgccaaagcattgttgacacataacctctaatataacaatgctgtttttttatcagttgcaaactcagatgcgctctaaagagggtgaaaagaagcgtgcttacctcacactggaggaacttcgccaattgccagataatacaaacacttacaagactgttggtaagaaagaattctctttcactatataatcttgttttgctatctgaagtcaaggggctacatatgtttcttttttgtttttctggttgagtcaaagagtggccttttgggctagcttgctcataggacgataatgctaaactcatctctagtaccgaacgatggaacttgttgatcaagtggcattcttatttacatcaatatatagttggttcacacattctgattttttgagagatctctaatatttaatggataatcataccatggaatgtgaccagaaaagaaaagttgttcacatacataatctatgtcttttgtagttaccttgtcagttgaccagtggtgacatctgaacactgtactgagtttgttgataccttgtggttgtagcatattatcttaaacagtctttgtagtcatagttacatcatcttaatcattaaatatcctctaatatttagtggataatcatatcatgaaatgtgatcagaaaagttgttcacatacttaatctgtgccttttgtagttaccttgtcagttgaccagtggtgacatgtgaacactgtactgagtttcttgatatcttgtggttgtagcactagcgcatcatcttaaagactctttgtaatcaatagttacatcatcttaatcattaaacatctttggtgcatcattcgttctgtcttgctttacgtgattactaggctagtgatttagttttgctattcatcatgatgtaatcatgaattgaaattaggtttattctaagtatattatccaaattacagtaaataaaattatatcttcctttctggttttaatggtttctccttttgtttgcaggtaaagtgtaagtaactcaatatcacttctggcctggaaagtcaatttcatgctcttgtatatgtggtgccctgtaataatgattccatgtgtttccttattacccccatttatttatttctagatttattttggagccaaaatcactcctgctgaatgagcaagaacaaaagcttaatgacagtgaaagtgcaatagcatcgatgcaggtatgcttgaacctctagatatgtttcttacctttaacatgtcgaaactctagaagagggagagttcctgacttatttattactcatatgaaccagacttccaaggaatatcttgagaagcagttggcagaagtggagaacaacataagagagctacttcagcaggaccctgggctggcacgccagatcctatcaatgacagttcagtgaaaagtagtctttttctatctttgtgagtttattttgtcgaatgcaatgctagaatttgttaattcgacacaacttgcttttgctcctcctgttatgtctctggtgcttcgctgtaatcggatagtgtatatctgcattctatatgatggaatttgttagctgatggggtgaacaatccttggccttgccttaaatctactaggggtccaatttgtcatgtattgtgggaatcttttaggcagtaaagtgactacatttcataggggttgggattatttggagctacagaggtgcatcatcaggtttgagtccctttctgtggaatatatttgtaagattgccatggttaagtcagcagggagatgccatgtcggcgaggtcctaggtgatgagccaattgatgcagtattcttttagcctctgtagtattggattccattcagatggaaacgcatacattgcttatgttctcttgttaaacctgaaactataactgaattcttgtgttttctgatctcaaagtgtttcagttcatgtgttacatcatgtcatcatgccatcctattcctaccattatcctgctgggacttgcagaagttataaagcttcatttgcccgcatatttctctttgcttctgatttcaccttaatctcccaatcaaatgagtatttactctgtacatcaactgcacatgagctgatatctgtttggccatgatctttgtcttggaagaagcatgcagagtttttgtgatgttattttctaaaaaaattgacagcatgtccccataattgatggatggagagatgaaaaattgcaatataggaacttgaaacttggagcattcagacaacacagaaacttggaaacagccatatagaagttgataatgttgtgagataagtttttggatcatacatgtcatttaaacaagtttgtggagcatatagaacaactattctaagggtaggccatattcacttgtacaatttggccacaaaatattattgttggccttgtccaaaatactaaacagagaccacaaaaaaactatagttagtcctatcgaaaaggcatatatcattcttgcccaaaagatatcaagccatcctgtacaaaagccatgtaaccatcttgcaaaggctggaacagatcttgatcacaaagaatatcatcatcacaacttggtactgtcacaagctgggtaaaatcactaatgatattgtattgttgaagcaccacattttttcctttgtggccgccatcatccttcatttgtacctgttgtcactgtaaagcatcatttttctttgagtaaatttcacaaaaccccgtgttttggggcttccgttacaaaaaaccccgggttttgcaatttgtttcatgaaacccaaggttttagagtaaaatgttccataaaaccccaggtacaaacttacatcgtttatttgactaatatatttatctataataattgtaaaaagaatatatgatatactttttagtacatctgtaatgttagttgctttttaacaagcgttgataatcatgttttgatcacatgtgtatatttaacctattattatattataatcagcagatattatgttaagcttttccagcgcaaaattgagaaaaaaatgaagtagacaagaagaatatgtccttttagccaactaatgtgaattgattaaaaaataatcttatgtaataataaaatgagtattttacatgaatacgaggtttcatgaaacattttggttcaaaacatggggtttcgtgaaacaaaacacaataaccagggttttatgtaacggataccccaatacctagggttttgtgaaatttactcaataataaaatatgagtattttacatgaatatgaggtttcttgaaatattttggttcaaaacatggggtttcatgaaacaaatcacaataaccggggttttatgcaacggataccccaatacctggggttttgtgaaatttactctttttcttttgtttctgccaatgagaagtcaattaattagttaagcaatttttggcaacaacatacatagatgagtagcttgcatatgatatacctttactccctttttttgttggtattgtacatttaggattcttgcgcttccccttgcgtagcttatcaatccaagttctagttctccttgagtagtttgactggacctccttctttagttgtgcatcactaagcaaatcatctctttgctgcgcatttgggtcaacattttctttgtcctcgcagggctcatttgtaccaccagcagatattaaattgagtttctcctctagctgtgtacaaaggcaatcaagtgcattttctaatactacacaacattctagagagtgaactactttatgtgccaaattgtgaaacttatgagacataaacttgtaccgtagttgagcttccaattttggatttgctaccacattccttccttgcctatcttgtatatttccattgcgtgcctctctagtccatctctttaagatataacgtggtggcaatttctttatattcattagatcaagaactttcagaccatgtgcacataatattcctgtccttccaaacattctacaactacatgaagctttttggtttcgaggatcaccgatcactatgtactccacctcaaaactaagctcaccaagcaaattcccaacaacatcagcatatttgtgttctccatccaaactctaacgcatacaaccatggatttttcatattcactttggaaagcttcaaaaataactggagtgtacacttggtttgcttgaaccaacataggtgtgcacattagtcttctcggtagcttcttccttgcctcaaattcagactctagttccttatctcttttctcttgcactaacctctcaaaatgcttcagaaatcaaatgatatcaaaatctaatttcaaatggttctaaatgcattgttgaagctctcacttagctatgtacttctcactcctaaactgaagacatctctcatataccattcaacctatttctctttcaccttgtaaatgctatctaaccaagtttgcttatgaactttggatctcataatctgaaattcttcttcaaatgatgtctcatcttcgtggccaaacatacaagcactaaaatcagagagaatatgagattcctcttcaccttcgtcttcctcttcacctttatctttctcttcaccttcatcttcctctttacccttcattggagacaaaaatgcttgccagcattctgcattatgtgaaaggtgcacagtccatgatatgattctatgaatactatctttatggcttttcccattgttgcatcttgatccgtgtaaatagttgtaggttgctttccattatgtgcagctagaaaagtctcaaacaaccatgtaaatgatgcttatgtttcatcaaatagaagtgtagcaccaaaaatagtggtttctctaaactgattgagcccaagaaaaacaccaaatggcctatattctttgtttgtcccaaaagttgtgtcaaatgtgacaacatcaccaaagtgtgcatagtcgaggaccatcttagagtcagcccagaatatgttggtaatatgctcctcacaatccagctgcaacgcatattgaaaagatgggttctcggcaattttatcgtggaaatacttcaacatacttcatgcctgttcaaaagccaattccctctaacgcttgccttgcaaataatttttgtggtcacgacaagtgtagctaaggttaagtgtcccaccaacttgacgagtggccaactcatgggcagcttttggcctaataccataatcatcagctgtttctatttcgaaagcttggagttctgaaattttccgttgtgatttcatcaagtggaaggtctctagtaagtagagtagatggttgtgttcaagtacaacatcagtgacttcataatttcctgcacctcgatccaacgaaatagtcatccgagctttgcaatcagttcttgtttcagctctaaaacactttgttacatgttctgtttgcctttttgttcgatgaccttcattggaacaaacatacctgcatgaagtcaccttaccatccattttgcttacatttgtgcatcttttcctcacatcaaagccagtacggccgccatatgccacccaaaacaaccaacactcatctggatttctgaacctcaaaccaatttcaggtatcttgctatcaagttccgccattgctttccacaacaatgaattgcccagtactcaaatttctgaaaaaaaaaaatccaaactacaataattagaacacctattttattatctcaaacacaccattcaaccataacttatcagaaagacggcgataccatggataggcgcgagcgagaagctatagtttgcgagagctcttcggttggccggcaggggcagcgcggcctcctcaggacgcaggggcggagctagagaaaaatgagggggggggggttcctaactttctttaagtaataccgacatatatagttttagaactatattatactgaatagttgtatacccaatacatataagcatcatctctctaattaatggcaatatacaacaagaaagtgcatggaaaaatttaaaaaatgtataccataacgaagaaaccaactgataataatatttgtaaagttgaatagttgataatgtgtaaacttagacaaaagacctctattcccaaaacatatgagtatatcatgcgaaatgtgatgtcaccatcttcattcctccatgcaacaatgaccttaacaaagagaggtgtagtttaattatcaacaaagaataagtcatgaaatgatttgatataaataaaaatagttacctattcaactttatcatatttgagggtggtcatcttcaagaaccacttgttcattagtaactttcttcatttcttctttctccatatagcaaatcaatctatgacacaagtgtttatcaccgctgcgattggataaaatattagagaatctatcatcttctcgcacatcaacaatataaagagaaagatgatggctaatttctcttaattccgagggagtaaagtcagctggatacatttttgctaatctcaccaaattgtccacattaaaatcatgaaatgaatctctaggactaaaagaagctgaacaaacaagcaattgagaggtagtctcattgaaacagttgtcaatctcttgaagtagccaatcaataatagtattaaagcaatccacatggtaatgatgcatatttgttattccatttttcctccgtggcctttgtggatcaatatatgtttcttccatttccaacttgatcatgtcattcttgtcacagaaggcatacacatcacttagcaatttttccgaaccatctgttctaaacccattcaagagagacctagttgatttcacacatttaatagcattcacaatatcctaatccttccgttgcattgctaatgacaatgtgtttgtgatcatcaatgttgtcaacatgagatgcaaataaaaggcgaagtcaaatgattgaaaatagactagaagaccgtttgcttgatctctatgtgaaccatccctttcatcatttgacgcatattccagcaccttgacaattgtcggaaacatgtcaaccaaactttttagtgttttgtaatgagaactccaacgagtatctccgagccttttaaggcattgctcttgagttaatccactcccagtttgaattagcccacatcctaaagacttagccacttcctcattattgatatctctaatcatatctcttctttttgatgatccacccacaacatttaataaggtagaaatcatgctaaagaaattgctaacacctttatgttttctaacaacagctacaattaccaattgcaattcatgagcaaaataatgaaaatagtaatctgaactactttccattgggatcaatgcctgtaaaccattgaactcacatcgcatgttgctagcaccatcgtatccttgtcctcttacttggctcatgctcaacttgaatttggtaaataaagaatcaatgacagtcttgaggtaggaggaagttgtttccttcacatggaccaaaccaacaaacctctctttcacaattccaaagctgtcaacatatctaaacactactgccatttgttctttgcaagatacatatcgagactcatcaactagtaagcaaaaaacatcatgcctcatttcttcgataatttgatctaagatttgatttgcaaaacactgagtgatgtctatttggatttcaggagcgaccatttggttattaatagttgtatttttttcccaccactttgccaaacacgggatcatgggctgctaagaaatcacggatctgcaaaaaatttcctttgttgtatgactctattgactcgtcatgaccatgaaaaggcaagcctagcttcagtaattccctagcaacatcaattgatccattaagatggataaaataggccctcttagcagcatcacttgctttttgcatattaacatcaatgttttgatttctttgcaacaaagcatcacagttcttcattgcttgattgtgcaggctaccaactccacctacatgctctcttagcctatcctttctatgatagccattccatccaacactaacaaatgctttatatccttcttcttttttattccggtccctaaacaagaagcagaagaaacaatatgctctatctttggacttgctgtactcaagccaaccaccaaactcatcaaaccattttggattgaattttctatctttgttcgaaataacagttatgggaaatacatgatcacgaggttggcaaggaccattctctaagtactttcttcttaccttgtatctttggttaggatgataatcatcaatttctttccttaagcccggatcaaatttgatcgtctcttcccaattggcatcatctagtagaagggatgaactcccggattgttggtacaatccggtgcctttcttttaagaaatttctccatagaaacctattagagaccaaataaaaattttcaccctttatattgatgcaacaaattaaatatgagagttgagagaaagcgctcacttgctctaagtgttggttaacggctgtgattttttataaaagcacaagcacctgcagccgttctactccgaaaatcccctccattgactgcaaacaagaaacaataacctactcattggtagacttgcaaaattaaaagaggggagcagcagggaacaaccacacaagacttaacaattggatttggaggcgatacaaccgatgttgcgttgggcacttgggctgcttgcctgcttctgcttgggctgcttctgcttaggctagagttggtatttcttaacgacattactagaaatataattcccagcaatggcacagaaatactcctggtatattatggttacagagttcatccgcaagcgcacggatataccattgtagcatttcacccgagagtattccaagggtatcgtatttatttaatcccatgggaagatcatagtagagagaacccgactaataatttatatgttacttgtaataatcatagtctaagtaggggttaagataatccaagggtagagtgacacacaagcagggagctactcattctcatactaaaatatctaagctaagtggaaagaaaatagaaagagaatctattcctatatttctagtatacatagtatacatacattctagttatatgatatactagctaataccctctatccaatgccctcctggttcttcgagaagccacccctgactgccgagtttcttacgacagcccatcatgaccatacaaccaatgctaaatacggaggattaccctccttagagaattaacttatgactatagacacgcgttgaggaatacccgtactgagcagtcaccatcagcggcccacctctcatccgcagcatataactccaaataataatatccagtaatctagacaccatgcctaaactaccagatactactctaatatcatcggcatgacatagagtaattgcataagcaaacactatacccgtaccaatgcatctcccagataagctagcagtataatcagtataacatgaacataatgtaaagttggcattcatatactcgagaagtatttcaataccataaatgtatatagaagagtattctaaataaagtacaaagcttacaaaagagaagagaagagctactagagctatactcgaactcttccgaagtcttccggactccgatttctaccccattcctattccactagcttgagaacactaaactaacttgagagaatatgagagagctcttgcttgaggtgtgtgtgtgaagtgaggatgagagctccttttatagcttgagaatgacggttgtgacggttggaaaggtcggtaatacccaccaaccgtcattggggagtcatctcagccgtccaggagaaacctagattgaatggcgttgccaggggggtggggttcggccgaaccatgggtcgggccggcctggcccaaaatcggcaggtggcctccttcctccattactctcatacgcaaacttataaattttggtctagttcatcatgtcaattctgagttcttggcccattcattcataagtctgattttcgacatcgtccgattgatttatcgtctaattcgatgtcgattctcctccactttatggttattccctacaaaaggttagtgaaccaaatactagtggaatattattattctaacatggatatgcattgcaagcataactagttctctattttggtaatattgacggtcgaaactgatagctaacgaccgtcaacagctaggcggctggccagctgggcgggcaggcggccaccggccggcggctggctcgggcacggccagacagcctgaggggcgcaccggcgtagtgcagtgccacagtgggctggcagacggtaagaccacgtcacaacgatggaccgattggtgagaaagagaaacaatcgcgagttttgattttttttgggagaggaaacatcgcaaatcgaaacggtgccgccttgcatcgctcaaccctacctctgtcgtgcgcgatcgaccgaaacacgcgacttctcgtatgccacatatccttttctttgttggcccttgtagagttatagttttgggccaaaggtttgggccttagggggagggcgttccctagtttgggttgggggagtgcctatatggtgaaattatgggggtaagaggctatttagaattttgggccgggttcttgggcacccccagcccattgggctccgcccctgctaggacgtcccctcctccacacgtcgagctaggcggccgcccgcctgcaccagtgtgacgtcaggcccggcggctggccacgccgggacggcagggccccggccctggccttgcgcggtggtcgcccggtctccctccctactcgcggcgagcctagcggtctggcgcctctccggttacggcggcggcgagcctcctagctggctcgtggatggccggatgcaggtgaggtgagcgcgggcgcttcgcgcggcggtcgcctggttccctccctactcacggcgagcccagtggcctggcgcctcttcggtcgccgcggcggcgcgcctcccagttggctcacggcggtggccgagcgagggcgatgcgaagtgcgcgggatggattgggggcgctatctcctgcctggatggattggggattattttggacctgcaggcgggcccaagcaacgaagtcgttggatttgttttagaaggctgagatccaccctatgtcaccttgtgacatgcctatactatgtcacccattcagaatcccttcctgccaccccatctcgctgtcgcaaggagaagagaacgagaagaagcaatgaggaagagaaaagagaaggaaagaaaagaaaaggaaggtgaaacctattataaattattattttttaatcggatattcattgatatgtgggtcccaccattttttatgattacaggtgccacgtcaacgccacgttagacgaggactcagtcaaaccagccacgtagatgccacgtcagtcgaaactttcatccaaaccttcttgggaccttaagagttggttttatatctgatatttcggtttagggataaatttcagactcgatgtcaaattgagggacctcaagtgaacttattctgccttaatactacatgccttcaccgctttggtttgggctaatacactgcaattttcgtttgtggatgtgggctcctgcgtcgcaccgggctccgccccatcactggaaagagggcgtcgtagagtagaatagaccgacgcagcaagataagatgcttcggatgccttgtatagtgtcctgtaggaatcagattcatttctttgcctactttttacaatttgaccttcctttaatttagatcttcttttgcaaatggacttcccgcagtactttccaggaaatgcatccacatagcagggcctccctatatagaatagttaacgttttgctacttcatagaacacactaggacagttatcactttctgagtgggggtattgtgagagaaaacgaatcggtcgaagagtagcgaattgtatgtggttattataggcctatgccataggacatggcgacatgtcatgtttgtgaaataaattctgagagggtatgtttttaaaattatttaatgaaaatgtttaaataatgaaaagaaatcgcaacacaaagctaaatccccaagtcctaacatagcaaggcgccaaataaaggtaacaccaaagaaacaccggctcgatagcaatgaattcgtcggtttattggggtttaagtcttgatggtcataaatattgtaaatcctgctatatgtacaacctactactctcatctgactgtgtcacatccatcatttactaagcttgtttctcaccatgcaggctcagacaagcagcacctactccctccgtccaaaaaaaaaaatttcattcctaccatcccaaggtgaaaataatagagagtaagaatgactaaaatacccttaatcattgaaaaagtagtaagagtgataggtaggtaaataatattgaagggataaagcttctcgttttacgtgctgagggtaggtaggatggtagaagttggtagaagttgagtttttttttttgacggagggagtatgcttttagccctttacatgctagtcagatgcaagttatacacatggtcggatgcatagcaatttccatattgcaaacacacggtgcattctcaatgtaaattgacagttaacattcgtctcatttgagtaaaatacgatgccggtccttaaagttgaagcgtggtatcacttaggtctatgatcttgtaaaatcaacattaaggtccatcaacttgtttaagtgaatcgttgtggtccaaaacacgtttgaccgtcctacgtggctatccagcgtggctgcatatttgctattagacccatccgagcccaatccaccctcttctccccccccaaatcattttctttttcttctcctctcttttttcccggttcttcttgctgccactgatgaccaccgacaaggtccccatggccgccgcacccctcctctccacaatgcacccttgtcaactgccctgcaggtgagttggccggcgagctcgcctcggtcgtcgtcaccgaggtggcccctgcctgcgtgcccttgagctcttgctgccaccatcgggatcgagctcgacaaggtggccgttgggagctcgacagagaagaaggcaactacggtcatggcctggctcggtgaggggggcagcagtagcccggtggaggaggcgacctggaagacggcggcagcgatgacggaagagttaggcgaggtagaggagtgtaatagaggtggcacccatctcttcagctcgacgacgcccgacgacttggtggacgggcaagcggaatctgcggcgcgaactcaccgcccatggccaagcctccaagcttgccgctacccaatctgccgtcaccgggaacaggagagaccctcacggatcttgaggctacacgccctcgctggagccatccctccaccatcgccggagagaggagcaccatcggggagaaccgtgcctcgccgacggccagatccaccggtcgcccttcccgatggtcatcggcgttggatccacgtcaccgaatctgtgtcgtgacgcttcgccgccagagtgatggatgccaagctccgcctagtcgcgggcattggatccagccttctctcgagtcgtcgccgctagagtgatggatgtcgagctccgcttgggcgctggcattggatctagccttcctgccagtcatcagcgccgcatccgacctaggatggatagtattcacatgccccttgtccccaccgctgcccccatgttttctgcgccccaactgttctaccgaccaaaccggtggtgtgaaagtgaaagggcctaattgaaaatatgcggccacgctggacaaccacgtatgacagtcaacccagtcaaacgtgttttggactgcaatgattcactcaaacaagttcatagaccttaatgtcgattttacaagatcatagacctaagtgacaccatgctccaattttaaggaccggcggtgtgctttactctttatttgaaataaatattatattaaagaactttcgagctatctttaggatttggaaaagaaagagataatatattctatgcccctaagtttatgttagttcaacgatttatcatcgattttgtctctctctgtaatttgccactaaacttttcattttttttctacaatatgtcattggagtttatacttttcaaaaatgtcaaaaatgcccttcaacacatagagggttaacaaatgattgagctactagaaatatcaaaaaaatataaaaaaaaatcacatagcatccttacataatatggagtgtgtgtacattttaagattttcaactttcatgtattaattttttcaaaaatataatttatgttctatatgctaatagaatatatgctacagaaaatttattttctaatccggctatgttttgtgtatgtgattcctctttcttattatgccacacaaaaatactatttcaaaaatatacattgaagaaaatcttaagatatacacacaaacttttatattgtgtaagaaggctacacaaaaactatcatatacttttgaaacttataatgagtcaatcaattggcaatcctttgtatggcttgaagggcattttagacatttttagaagtattcaccccgggtggtatgttgtaggaataattgacaaagtcagtggcatattataaagacagataaaatctatggcaaatcatgaactagagtaaacttatgggcatagaatgaattctcttaaaaaaaatcacataagactgttgttacatgaaaaaagacattaaccatacgaacaacgaacaaaatactctagatcttgaaactttctgaatcgtagtcacaacgatctcagtggatctcttcttaatattaatgttagtcacaatgaaggaccatcaagtgagcaggttgccactcgaaccatcaacggccgcctcataacagtgaacagcattcacacctctgcaattgattttgcgaaagcaatggaagcagtttctcctcacaacaacagttttctgaagacaatgttatgtacctactataaggctgtaatgcctaatggctcaacttctctatgaaaaagcttaactgcagtgacaatattcgaaatgtgagccaagagaaactggtcatgaattggaggttcatacaaattgcagccaagaaagtttggccacatgtcgcacataaatagttcatacataacaggtttatcgattttgtccaaatatagttctcgatccagcctagggggtggattggtcatttcgtgccctgttcacgttgtcatgcacatgtggcgctctagagtgtaaaaagtggcaaaataaaattacaaaagcttctctatctagtggcaaattggcaaattcttaagtgcaaatataagaaaaatatttggctaactgccaaaagcaaaagtgataaatagttaaattttctaatgatatgagcacctacgtttttactatgtttctgaaaaagaaaataataatatctaacttatagaagaaatgacgccgaccagtttataatccatatatgttatttagtctttcatcaactgctggttaacttatcggttgcataaaaaaattgaattttttagtgaatttagttttattttcatcattttctttttaacctctgttaacattgatatattgtcataaactattttcgcttgcgtagtttatttttctatggcttacacgtaatagctcaaacaattaatagtatatcattattggtgggtttattatgttatatagacttgttaactttgagaaatcgctcaaaatgatgttagggaaaagttaggcgatatttagaatagatagtttcacatgtgagtaatagaatagcacgaactatgtgtcctaaaatgtatcttagattatcgattttgttgattattttacgaaaaactctggacaaatgctttaatttatgcaaatatttttcgcgaacctagcaatttcttgatgtacgaaatttatgcaaatattttcagcgaatttcttgttgctactttgtacatctagtttccctctttattgtttttgtttagttaaatttgttgcttagtttttttattgcatctatagtagtgtatttataaagacacttttctctttaaacataggatattatcatgatgaagtcacttttttattatgaaaaagctaaaactcatattttgtttcctcttctttatcttgcctttttatttatttatttattttacttattttcttctctatgaaagtgtttaaaatctactccctccgtttcaggttatatgatattttgacattggttaaaattaaactgcttcaattttaactaagtttatagataaatatagtaatatttacattcccaaattagttttattaattaaattaataattaaatatatttttataataaatttatcttgggttggaaatatcactatttttttctataaacttccacaaacttttaaaatatcttataatctgaaattatttttaccatatgtatttcaaatttatcttcacttttagccataccaagtgaccacccagtcagctaacagctaccctgctagaaggatagatagatagcagtaagggcgctcctggaaaaatatgttttccaaggggctaatcgtgaaaactgatccaatgccttcccttgcttggagaataaagcagagaccgagacaggaatctgtccgccttgaccaaagcaaagcaactggtattgaagcaagcaagcgccgtgctgctctgggctaaagaggaaactgatcgaggaaggtaagcaagcaagaggaggatgtgcgtggtgctggtgtgcgacgagccggagcgcgtggtggcgacgtaccaggcgcccggccgctgcccctactgcggcggcggggtggtcgccaccgacgtcgagagcgccccacgcctctgcttcctcccgctctgcttccgcctccgccgccgcttcttctgctccctctgctcccgccgcctcgtctccgtcgcctaagctcgtactcctatctatgtctagtagtagtaatcatgttgtacaaattgctcctcctcagattgtttaccgtacctgtattaatcggtgatgtgatagacgtaataacttgaaattgctcgatataatacagcatactgagaatttgggctcgtttcgattcgatcgatccggttcaagaaagcgttctgcgagattattcagcgaaactcaccgaattcaggggaatttccaggaaaattaaggaaatcggaattaaacgagtcgtcgagagcatttttatttcggattcttcacggtacaggtacaaacacgctgaagagaagagagaggaaaaaaaataagaagaaagaagcagagtaaggggtcactcgagtggggagtccacccggtcgacggcgcgagcgaaggccaggatgtccgacgagccctcggcggccgtcttctcgccgccgcccgccggcgcggacacgatggcctcccggagcagcctcgccgccgtcgggttgagggaagaagcaggcagttggctgtcgtcgcaagatcgctgcctctgcttctgctgggcgctcgcgggctcgccgccgccgtggctggcgtgacgctgctccatggacctcgcccggtcgagcggtacactggagtggaggcggcgatggagattgggatcggtggtggacggggcgatgcaggaggacactagctagctcgcgaggctgtggtgaggagtgaggtttggtgatctcatgtagacgaccccgatctggtcgtctctagagctttcgatcctccggccggcggcagcgtcgctacacgtgttcctctccgggaggcgtcggtactgccgcagtgacgcgtgtgaaccgtgctgtcagtgaagaaaaagctcaggaatcaatgaaaaagaacacacatcagcaagttaacgccccatctcgcctagctcgtcaggtctgtgcttcttaaaaaaaaaacctgttttgttgtcttaaaaagagtccatcacaatatacatgaaataagccagcacaacacacatcaacacaaatgactatattcactatgttcaagtgaaacagaaattgtagtgctatgttcagttttacatttttatattgaacagacagtagcaccggtctagcaaatatttagggaagaaaggatgctcatctgggctcttgtgtgtcacaatgaaatatacttaacacaacatgtaaactactaagcctcttgaaccctaagctcaaccatctgctttgtattatcggcttgttcgagatctgtagcagacattgtgcacgagtgttcggatgatcgttgaggtcaatcaaggatacggaaaaaccccagtaaaagattcatcgcgattcaacaaaaatggttagttgcttatgtggaaatctaggtagagaagtcatagaaaatgcctagatttccgtcgtcattgatgaggcagctcaattataatttggctaagaaacctcaactgacaaaaaaaaaacacaaatatgacaaacatattcttgaaggccttgcagtactgaatgtatgcatctaaaactactactcataattactcactatacctaaaaatattctaacaaaattacaaatggaataaaaatacttttttttgcaaaatttaaaaaactgagaaaaataaacataaatatgagagaaaacaaaaggaacaaaggaaaaacatatctaccacacaaaactcctcattaattttaggggaacacaacagaaatactagccaactacttattacaccttaaaatttactaacaaaattataattaggctaacaaatctcaactgacaaaaaaaataaatatgacaaacactgataaaataaaaaatcagtagaagatagactgtgatctaaataatatgatttcatagttactatcatgtagatagaacatcagcttgattaatatatatagcaaaatttctaaaaaagataaaagacaaataatatgattctagtacgtcagctaagtcagtttatgctctaacaattatatatttcttcatctaaaaaggttgtcttaaacatgtatatctttttttaacggttctcgtttgtatatatatacaagtggtcagtgatgaactaaaccaacggagaggaggaggagaaaagaaaaggagtgatacggtgaaaaggaggagaaaaaaggtgttggaaaaaaatagtgtgcggctagtgcagggatgtgtggggcgaacttgctctcgatgttacccgtgcagcccctgaaccgcccctcggggagcgatttttctaagcgagagtagctatggcagcacctgcaacctacaggtgttcttgtccgaaaaaaccatttctacagtcatgtatgcgctctcgaagccaaatttgctcccaaggaccaagatgttgaggtcgcgcaagcccacgcaggcatcctagcgtgtaggacgccgttgacgaggtccgaaaagcactcgttggtatctgtcgtgtcatcgtcgagctgcaatcgtggggaggcttgtccagacatgaatctagcgatgggagagcacacaggagtggatggtggcgaccaagggttgaaaacaaggatatgtggtggagcagctcgtcggtaagggagctgatgcggtcagggcccttgtaggcgccaccctcatcggcgccggaggccctctcacgcttcgccagtggctgctactgccatcgcaatccatgggggagaattcagggtggggtgggagatcgaagcaacgagagggatctatgttaggttatctatggctatggtactgtcttgacttttgagggtggagaggggaattggaggtggctaggatttcgtgaaatgtgccagacactgctgctgcttgtcctaattaattcatcacacacacgcgtccgtccgagtgtctggttgtaaggaatggtgacatcagctagtgtggccattaattaggttcatcttagccgtccatgtcaagatcaatggtgtagtcacgtttgtactctctggtgacagagctttgtctgtgtggttggtctgttagtgtcctaagcactagttattagtaaaactatcaaccatgcataattgagggatctatgttaggttatgttagtgtcctgagcactagttattagtaacatagagggatctatgttagattatctatggctatggtactgtcttgactcttgagggtggagaggggaattggaggtggctagaatctacactagggatctatgttagtgtcctgagcactagttattagtaacatagagggatctatgttaggttatctatggctatggtactgtcttggctataggcccacagggcctatctgggcctcaaggtatgtacgccactttttttaaagaaaacgtacatacggaactcacgtacgtccccctcgttagtgttaaagaattaagaaactataacacgactacaatatataattcttctgaataaaatgtgttgtgcacaatggcagatatatcttcaaatagaaatgtctcgtctacattctagagaagactagcaaattactcgtgctttcactacttaaaaaatgattttccatgacactttccttttatttttttcaagcggactaaaaatagtgccaccagtgaaaatcacgtttattttcactggtggatgtcttaagtgctcgctagtgaaaattgattttcactggcggattcttatatcccacacacataagcatccgcaagtgaaaatcgattttcacttatgggcgcttaagatgtatgtcagtgaaaatcaatgttagaaaaataagtatttgtgtctagctttttcataaactcgaatgaaaataaaatttatacttaacttgtagatcttaatgagatctaaaagttgattttttttttcatttgagatcatttagggttcaaaatatttgttataagattcaagatctactttacaaaatttcacatatatgattcaaataacctctgatggacatatgatctatgtaaaagttgtagagctctacgagatctacaactttgtagttcatgactttttaatttggaatcatttagagagtaaataagtattttaaatttcgaacaatggaaatcaaaacaatagcattctgtatatagtcaacaagtgcttcatagtgagatggtaatgtaatatatgtgtggagagagatcttgtgtttgaatcctacaaattacataattgtgaatataatctaaaaaaatgcataaaatcaattattttattttatttttgcacctaaaaaattcaaaatgaaaatgtggtactcgattttcgctggcggctgtgttatgtcatattttttttattttatttttcgcacctaaaaatttcaaaatgaaaatgtggcactcgattttcactggaggttgtgttatgtcacccatcaacaaaaatcgattttaactaatgggcgcggataccgccagcaaaaatctttgattttcattgacctttagttactggcggaacgactgatcgccaagaaaaatatgttatagccatcagaaaaatgtgttttgtagtagtgtttgcaacaggaaaaagattgaaattacaacaactatctgatgattagggtttaattttggtgatctaatatgacatggggtgccaaacaatggttttgctgtcaacgagatcaccggcgccagacctatcaaattggccgatttagtttaggcacggtcggttacaattaagtggtccaaaatccacggttgctctagacatagaaccaatgacttcggtttggaaacggtttgaaatgatggagcaacgtatgtttccgaacgtgcaggattacattttggtgttctttgaagaagagaagatgtggatttcgaccaagtgctgacaatgatgacgcgcatagtggacggtgggatgtcgcttatgggcattagcatggagattgactaagtaaataattagccagtaaactgagagacacatgcagcatatattacaataatgcaaaaattattattcctttaaatatactaacatgtaaaaatcttgtggtaatcagcagtatcaacttgtgacacagagagagacatatcttcacatgcattcggggcatggcagcaacaccaaactaggaaaaacttatacctacactttgctagaggtggcgtgtgtatgcttagatcatgcatgcatgcactgaaagaggaagacgaggatgagacgcatgcaggaagtacctatcgtcaaacatacgttcacacgatcaatggacgatggggcaatgggtagtatatcaagtgtatcagctggtgggcgactatgcggctgcgagacgatcagatgagacgcgcatgcaggaacaatggtggagccgttctcacaatctcacgtctttatccataggagtatctattaagaattgagagaaactaacttgatcgagttagaaaagggagtgcatgcatctgtgggtgggaccatgtaggattttgttacccaaactgattcggtgacgtgtcaacgttgaactgcatgtgattgctcgcgtggtgaggggagccggatcggagtagcatcacagctgcagcagcgagcaccttccattggcagaagccaaggtgtgaccagtcctgtacgtagcggaacagctgaatgttggcggatgcgctcgtgcagcaaaaatcgaaagagcgtgtcatgcagaaaccgatttggagaggaaaaacgttggcggatgacgaaaaccttttttactttttaggtagtagagatatagagaactagtcatgtatcatgcacatctattgcctgaaactgtttcacattggcctcaaaacagaggttatatcaccattgtatattggtactgagttaagattattcatgtacaaatgacacaacattagtcaaactactataaagaatcagaaccatctatccatctttgataggcaacaaatacttcaaatggcaggtaatctgatgggacatggccagctccctgaagtaattgtaggaaattaatagtgacttagagatgcaacatccaaatttccaccaatcatactgtgttcaattgatagaaagatgagaaattgttaccttgattgttgcaaatagtatattattttcataccgaactgaatacctattagtaatcaacaaagtgcaaattagcttaatcataacataaattactatctaaaatgtcttaatacttaagtgtgttttttccataagagaaagagatgatttacaactttagagttagtataacataaaaaagatgttgacatttaatattgacaactgatggtgtctgagtgcacaaaaaatagaataaaaatggtgcacttctgtcacataccacagagcatgcgaagactaacacgctcatattattggcaattctacaaaggaataacgtgtataactatatattgatgattcggagtgctcggtgttataatctctttcgttctttggataatgggaacatattattcttcatcattttttccttaacatttcagaatctaaatcctccatgtgtttgggaacctagaatataattcaaaccaaatatgcaatagttttttttttctctttctgctttcaaattagttttaagtgaccaccttttatgttgactcggttctggattttattttaaggatattaaccatgcctataatgtaagccgggttaggacatgatactctacaatagcaatgatgaaagaaatattgcccataagcatgaaaggtttggttccttcttgacaatgagatgtagcccaaactaatcgtaagaagccctagagctgagaacacaacaattgttttctttttttctaaattgggctttttgtatcttatcatcattattcataggaatagaaatgttttgtagacatgtgtctgcacttggtccttcacttgtacgatgtagaggtttatatagtggtcacacatatgatcattgtatcaaggcatatgttaatcaagcatcctttgcaccttgactaattaaattttctattatttttatgaataataaccaagatttatatgatgaattacaatagttagcttgaccattggattaatttgctgtttgcttaaagaatagaaatattagttattttaaatatatccaagattggatacttaataactattcgaatgtagagatttacttaccctgcaatttgtttctctacaaaccatggatgccatttctcaatttccttatagttcaatgtttttagccactctaaagttgcagaaaatgggacaagcaaggcatgatctccactgcattggaaaaactcctccaattaaacacatatattatattcagtaaaagaagcagacattatataactagaagaaactaatctcaaaaagtaaatatttgtggcactttatgatataactttgatcagtaacaaacaaattcaatagcataaatcatgctataaaaattattttagttttccaaatttttatctattgggatgagttaggctacaaaagttgtcctctagcaccatgtttcaattgtttctacacagaatatcaagaacatattagcttgtatatatggaataaataatactctacaataacacacacacacacacccctacatacctattcgtgctagggttgaaagtgattcggataatttccgtccgaccggatcttttttcgggttcggatagtttcggtcggatatatctggaaattttcgaattcggatattttttcggttatgaaaacgaatatgatataggtgatatccgtcggatattatccggtattttccattagatatccgacttacacacaaggcccataagccagcccaacccaaagcggaggcaaatcagacttcttggaaaaaatgaacttcgaattgaattttatgataataaatgaactcatatgaaaaagttgtaaaaaacaaagttatggaactcattgagatgtaccaattttatatttgtcatttctccatccgagtttgattgaactatataaaatttgaattttaaaatatatgaaattcaaatatttttttcgggtagtaaattgtcaaaaacaaagttgtataacttatcaagatctataacttttattttggtcatttttctatatgactttgtttgaacagtttgaatttgaatttgaaaatatgacaacttcaaacaacattttcaaatactaaatgatttcaattgaaaaaaatcatcaacaacaaagttgtataactcatcaagatctataacttttattttggtcatttcttcatccgataaagtgatagtaacattgtttataaaatttacatctctcatttggttttataaactattagagagagatgtaaattttgtgaacaatattactatcactttgtcggatgaagaaatgaccaaaataaaagttgtatgtcttgatgagttctacaacttttatgttcatgactttttcagctgaaattatttactgcttcaaaatattatttgaagttttgagtataataatagcagtaaaaacacaataacatgatagcgcatgattttagaaacacaatagcaaaaaatcgtttgtgagtagtgaggggtttttatattccgattaatattcatcaccgtattcgtttcacttcgtattcgctctgtatttgtattcgataatattcgattccatttttatatctgggtttccgattccgaaaaaaaatatgaaaacgaatatgatagagctagtttccgaccgtattcgatctgttttcatccctaattagtgccatgaaaatatagaagtatccaattgcatttaatgtacatacctatataaaaacactctgtaacctttggatgttacatttaagtgatactctgttaaagttggaatatctcttgtgtattggataaagttggggcatctcttccacttttgtaatatttcaatctgcggaagaagatagcatgtcaaaaatgattaaatatcatgcggatcttccgtggttatcattatatggtaactgccactaaaacgtgggccctatggagaacggagcccacatgcatgtcagtggcagtgtaactacgaaggatcccggttcatacggttactattacttgaagaaaaatcacaaactattgtaacaaaatagaatattgtaccggtttggcatgcagtttttctctgctggattttgtgtcaaagagtttctcgaggaccagttcttgattctaaaatataaatttaacataagtggtttgaatatgttcataaaacaggagacgtgtccatgagttccaaaccagtgtatacattctacaactaaaataaacttttgatattgaaaatcatgtcccagatctcatcacatattggtccttagttacttacattgcattctaaaccatactcggagctttcggaaaggagctcaaacatctgaccaaaatcatattcctcattggcttctttggttattcccatttgataacgacatggtggacaaagaatatgttccatgttaatgccactgatttgctgcacatcaatggtaattttcttggcaatagtagaacaaaacgtgatatataggtagcattgcagatcttgtttaccttatgaaactgttccaagtttgctagacaagatgggcctttgttattccagtacttcccattgcacgtactaactaaattctgctcccaaagaaagtaaaccaattacttgatgagtttgaaactttgaatgcatgcctcaggaaaaaagaatatgtgaaatgaaaataaaaaaaatcaaattttaaaataagtatacctgatataattcatctgaaatcaatcccattcgaaatgcataaggtacaaacgcgttattttcaatttctacatcaacagctggattacacagtgaataaccctggaagacaaaatagaagtattttagttgaaaacataaagcataaattaaaaatatgtagttacatatatcaaaataatcaataaagaatacaatttaaatagaaaatacaaaagaactgtatacaatttcaactaaaattgcttggaatatgttttgaaacatcaccttaaaatttatctttattctgccattgtcttcatttcctaaaatatttcaatacattagaaacaaaaagggtaaatgagaaacaatatgcatcatgacatatatcttggaaggttaataaatacatagaaacactttgagagcatattgttttcatatctaatatttatattttaaaagatttgcgctgccacttacgcttcagaatttcttgtgcaagaactggtactatcacgccactataggagcaaccggcaatgtagaaaggatttgatagaaactcaagatattcagaaaaccactggaaaaacaatcacctcagtagtttgaaagaaatttatgtccattacaaaacatgcatagaaatcacagaccttcgataaaaaatcatacaggtccaatactctgcttgtatcatttgttacatagtcatcttcattttcagaataagaatagcccactcctgctggtgagtcaaccaaaaggacactagacatctgtggttgggacaagcaagagcacatcagtaatatccaggaactaaaattattgtatttagatatattatacatggaagtagcatacaaactgaatgaagttgatttgtcattactttctaaaaaagcactgcctgcgttccttttttatgtatcaccttagaatcagtgatgtcaaactttctaaactttcacctatccagagatacttagaatggccatgtgaaaacttatacctttagaattgtcattgtaatactctataatattattatctattgacttttcttaatataagtttccaaatgtaaggtagaaagtttaagtaaaaatcactgattttaaaaaatgcatggagtaataaccatatacctcccattttctatatgtttcatgatatcactctttaatcaaacaaattaactattaaggtgtcctaaagtacaagtgtgatttatgaagcatcatgacattgatcaatgagagggtccatattaagagaagcccatgtgcgggcatattttgtggttaccttactaatataactttgtattttaataagtgtagaagcaaattaaactacatactgacatatgacaaaaagaattgaaattggcaaaactaaaaggaaatggcaaatatatctaatcccctgacagaactaaaaggaaatggcaaatatagttaataccaacaaggacttggtaaacatgagtttacttgcttgctagttagtgtattaatttacctttgtaagtaattaagagaaatagtaagcattattaatgggcttcggtgtgaaaaggttaattgaactgcattcattaaaatgttcaataaaacttgtagttgagatctttgtaggcataattacgtaagtaagaacatacactgtacatctatctaaaatacacttgtttgtcctacatataaacacttctctactcgtttgtgttcaaccctaaaaacttaattccacataccttggtccatgagaaaggatttaacttggtccttggctcatctctggcatgaatcatgggtccctctattttcaatggtcctaaaaatagtttttgtgaaatttagttatatatgtaaataatgtgtgcttcattaattagaacataatcagtagaaaaaatatgcacctgcctcaggtatatttagatatgtatataggcatcttactagcaaaatgctcactatactatttctcttagcatagtttttccatgcttatttgttggcctataagtccactactaatgcaacaaatctacatatataattgtattagtaaaatgcgacaaatctacatatatgttgtccagtaaaaaaatcattattagaaaagtttatactttgcaaattcgtctacaactacaacaatagaataacagtgggttttttttctaatggcataatcatgtaacacttcatacaattctgaaatatgatgtttaccgattgaatgcaaaaaggcactaaatcctgaacatgctgggccaccatttatccagatgatgacagggtcagtggttgagttcctttcggaagtggcaaaatagtaatacatatgtctctttagcggctgatgtccaacagttatgtacctgtcaaacaaacaaaataattatttatatatttttttaatatggattaagatgcctaatatggtttcaaaattctttgggtttttatatgctgtttcaatttatatgattgatgttgtttaaccccagggcgaactggcccacgaatgaattgaggccacacaacatacacttcgatggaccccaacatttctaatggtacaaaaaaactcatgaaacatgatgaattcaagatcatgtacagctaagagctaagagaaagtattataagcctctgaacactttcccctaagtgccatataagctcacatgataaggtggatgagataaataaagagagagaatgagttgcatctcatgcaaggagcaacttcaaagagagaagagagcaagaggccaatgaattgataggaaacaaataaaattaaattaatatggtgtattggggcaagggtgctagaggtaatgtgttgtgtatattactccctccgttccataatataaggtacaactactttttaaagttgtttcataatataaggcgcgcatacatgcatgtcattaaatagcacttcttttccactaaaatattattatttaaatcctccaccatcaagatatctaatttgatagggtgcatgcattctatttattaggatgattcaaactatgaggtggtaataattatttcttgtctttgggttaatagtggttgtgccttatattttggaacggagggagtacattttaattaatgagttgatgatgtggacaaaattaaagttgactatcaatccactataaaacttgctctaagttccctatataagactaccaaatttgataccctccgttttattactttaattttagcattcaatttagtttatcaaaatactttctcattccatattctaaatcattgtaggtgatcttccctcctgcccttcattactttagccatgcacaacaattactcagagttaatgactgctttaggaaaacgattggatgcttaataatggtaatagttaatgtatatcataattgttagaatgatacataacagatactctctctgttattagaaaaaatgcattttagaatttgtgctgtgcaatctcaaaatcttaacttgggtaaaaaaaatatgagtaaagtgtatgggcggtccttaaacttatatgggtatgtcatttaggtccctaaactctcagaatgcatatccaaatcacagaacttgtcatagtgtgtcatctatgtcccaaattgccacaaccccttcatgatcctatgtggcgttgatgtggcatgccacacagacatgacgtggcattattttgactgataaatgatacccatttttttcctttttatttttttcttctctttttttccctttcttctccttttctctgtgatccgtgcaaaagaaaggaaaaaaacaagaatgaaaagaaaatgaaaaagaaaaaggaaagaagaaaaaaaaaggacacatcacgtccatgtggcattgccacatcagcaccacataggatcatagaggggatgtgtcaatttgggacctagatgatatattttgacaagttctagaacctggatatacatttttgagagtttaggaacctatatgacacaaccctacaagtttaagtaccgccaatgcactttactcaaaaaaatattaagaaggtatgtcgaaatgacaatatataatagattgacatggagattgaatatataaatgaaaaaaaaaccattaacttataaatctaatacttcacagagctacatggtcacttatatcggtcactctttacaaaagaccgcaacaaaataatttaaattcaggaaaaaaattagtgatttccaaaacggggtggtgatgaatttggtatcgaactgaaaacggctgcaaacggccgcatatatatagctggctatgctcgatcatgtaaccatactccttattaccaaagaaaactacaccggatccgcgtccagtttatattacaattcattattcgtaaacttcaacaccttaaatccttaattcataatcaaaccaaatcaaatcaagagagcaaaagaacaacagcagatatatataaatgaggagaaaactggtgagcgtgggcacgcgtcttctaactaacacatcaagagagcaaaagcgaagcaacaacaaaattaaacccacggcgtaattaagcaaagtaaagcaacaaggatctgatctagttattcaataaatctgatctaatatattccttgttcaattcgtacccagcgtagtgcttggaggggaggtcgccgtcgaaccccgggaactcggagacctcggcgccggccgggacagcttccacggccgccggcgccggcgccgcgcacagcaagacaaccaccaacgccgccgctccggcgacgacgacgactcttcccgcagagatggctgttgacgccctcaccatctctggcattctagcttctaccgatcgaaaggctatgatgagagaaaagagacgcattatttgcatttatgtactacacacaaaaaagatagacatgtaaaaataggtgaaatgaaactgaaaaggggatgcatatgatcatatcaaaaccggcaggtgccagctgtcgcgccgatgagcggatcgtgggaggaaagggagatgtatatatctccccggcgtccgtcgtccgcttgtgcaggtgtgctggctggccttgatttcttggtcgatgcttctttctgttttttttttttgactttttggaggggcgtgggcgcgtgctttttgttccggaaatggtgcgcgcgcgggaggagtgaggaccggaccgtgggaggtgtgatgtgttgtgactgactgcttgcgtgtctgggtaaggccttcgcaatctctcttacggcatctccaacagagagccaaataggttcctgaaaattattttttagtattttggttaaaactggtctccaacatgctgtcaattacggtcctaaaatttaccccctcctgaaatcggtgccaatctcttcagaatttgggaagcggtacgccctcccattcccaccaatcgcgccaatttatttttaccgtccgcgccatttttttttccgcccgcctccttttccttctcgctccttcctcgcgccgttttctttctcgcgagaagcagcgcccacgccgccaggctagggttttgggagctcctcgcgccagctccgtcctgagcaccgtcggctgccgattcaagtcaccgccggccggccgtccagggcttcaccggccatccgtccagggctccgccggccgcctatccgggggactgccggcctgccagccatccatccaggggcagcaccgccggtcgcccgtccagggcaccaccacctcgccgtcgaccgtccatccaggttgccccgacgacgacgtgtgctgttactgattcacttcgaggtattttcagagaaacaactttattcttttcaagcttgaagttcctgtactgatttccccacaccggcaatcccccacacagccatctagttcatagggatatctccccaattttttgatggagatgcaaagctcctcccttaaatcatcgcgcccgataagaaaaaaaatgtttcccaaatcactgccacatacctcaattgcagcacttatcttctgaataatgcaatcaaaaactgttgtcctgtcctcttcaaatgatttccagtggatcaggcatcggtagatgaggtatgcggcaataggccttgcaatagagaaacccagatcttcagatatgcacttgatcaacaactcatggatattcagaaaaatacagaaaaaaaatgttgaggcacaacacctgaacgaattgtgatactgcttgaaaagaagttcagaattactaagcatcatacctgttgctgcttctcagcttcaggatcattcaggccaggcaattgagaattgttctcctagattgaaattaacttttgttaaatcaggaactcattttacgaatatactgatcaaatataatttgaggattatactaacatggatgtcacaaaagttactggactataccaattgttaattcaacagtgtttgcttgcgtttgtgttcagtcagatgcattcttcttcaggttgtacagagccctaaattaactaaacaatgagcttctatatgtgcatggttttgtttgcttgcagcagtatttgatgaccttttcttagataatttaagtgtttgatgacctgaccagttagatgctcattggctagatattgctattagcttctagtatcttctgaccttaactttttagccttttgtaatggattcagtgaacatgtgtgaaattaaattgcagagtcccaagatgctagtacttctacaaacgtactagtagtattgttcttatctgatcactaaattaaacaaacatgtactattcgtaggtcctattgataatggaagaagaaggattctatactaatttgatgaatgagggcaacgattccttagattgggatagtttgagtagtatgcctgtggaggatgatatgagtaaccagcttgatgagaatggcatgagtagcaagcctgtcacgcagcagttccccactgctgagaggactaccgtggctagaccaaatcaaaaaagatcgaagaattttagcgaacaagtagataagatacttgtgtcggcgtggttgcatgtaagtttggatccagtgctaggcacaaatcaaactcgtgctgcatattggactagaatatacgagcacttctacaaaacgagtaaatccacaccagatcgcagccagaattcacttatgcatcgttggaaaactatacaagagaatgtcaacaagttttgtggatatctgagccagattgagggtagaaggcaaagcggggttagtatacacgacaaggtaatacatagttatgtagcttgtgtttttatgttactttataaataaaaaatgtgatgtttgctaactacattcaccatacttgacttgtgcagatttcttaggcaattgctgtatttaaggagttggaaggaaagccctttcaatttcttcactgttggactctcttgcggtcacaatctaagtggcatgataagatgaagcaaataacatcccagaaaccatgtgccacaaacagacagaagccaagcacagatggttcagcaaaagctatacccacaaatgatgaaactaccaatcatgttggcgaagataatgaacctacagagaccgaagagccaaagagaccgatgggtaagaagagggccaaagagcagttgaggcgtggtggaggtgaaacatgcacagatgcttttgatcatttgtgggagaaaaaaaaagaagctgacgcagagaaggagagagatgagaggcaccaaaagtcatatgaactagataagcagaggcttgagttagataaaaaaaaggtcgcgaatgagatggatgagatacagttgaagaggatattagaagaagagagaattatgacaatggacatttcttccaagcctctctcacagcagcaattctacaagtgtgtacaagatgagatcatctctcgtcgcatgaacagttctggttgataggtttgtgtttcataacagtttacattcagttgagtgcctgtgtccatgcatatacttgttcttgtgtccatcttgttgaaatgctgcctttgcacagctacactacaccatctgattcttaaatatgttgcatgatccactaatacatgggactacatatatttttaaatatgctgcatgatgcactgccaaatgttggtctgaactttggtctgtacatgtattctgattcattttcactccatctcattgctatcaacagggaagccaccagatcagagaatgggagggaaggagatggcaatatttggtggcaatcgtacttggagttcatattagtgaagatttgttagaaatttacctaggtttactaagtctgtgcaatgcaaactatttatattcacaattgtgtctattttgtgtgtctaaattaggtgagtttactaagtttgtgcaatgcaaactatttatattcaaaattgtctattcagtacttgggtaattccctcatcctgctgtcagtaatgcttttgtctttgttgctgttgacagagtcagaagcctcatatattttgaaatttgtactaatgatcggtcatcttgctgacaagctgatgcatatcttgcaaattatatataagctgaactgtacctatgactaggttgacaagttaaaggaagtacactattatttattctcatgtactattcttaaaccgaacaatacaacatttattcaatacacgaagaccaaattaaaataatttggcaaatcctcatagatatatttattacatgtaattcaaatataaatataaatataaaacctcaatatttatcaggataatgctgccacaagtgctccacgaggtcttcacgtagttgatagtgggtttcgttgtcccttattttttttgtgcgactgaataaagtcatcaagatcaggtatttcatcatgggacactctgacattttctcccccctctgggaatcgttcctcccaatcaacttctccctcatcttcaataatcatgttatgcatgataacacaagctttcatgatgtatcccagtgtcttttcatcccaatatcgagctggccctcgaacaatggcaaagcgagcttgtagaaccccaaaagctcgttcgacatccttccttactgcttcctgtgctttggaaaaatatttcctcttgttgccatgtggttctggtatggtgttcaccaatgtggcccaagaaggatatatgccatcagcaagataatatcccatcgtataatcgtgaccatttatgctatagttcacttcaggagccttgccttcagctagctttgcaaatagcggggatcgatgaagtacattgatatcgttatgagatccgggcatacaaaaaaaaagtgtgccaaatccagagatcctttgaagcaactgcttctaaaattattgtaggctcatgcacgtgcccttggtacataccatgacattccgtagggcagtttttccacttccaatgcatgcagtctatggagcctaacatgccagggaaacctctgttctccccaagttcaagtaatcgagttatatcgtttttattgggtgatcttaagtactcatgttcaaaaacttcgacaactgctttcacaaactttctcaggctctctatagcggtactttctgcaataccaagatattcatccaatgcatctgctgctataccataagccaactgacgcattgctgcagtgaccttttgatgacaacttaacccaattacaccagctgcatttctcttctgcacaaaatagtcatcgtgatccgctaccacattcattatgcagagaaacagaggcctgctcattctattcctgcgcaatcataactaatgagacacacatatatatatatatatatatatatatatatatatatatatatatatatatatatatatatatatatatgtatgtatgtatatatatatgtgtgtatatacatattatatatatacacattatatgtatatatatatatgtgtggagggagcccgtttggtgtgagagtgttaagaaattccggtggatagtagttatgagggtcatcttccgcacaatcaaagctatggtacaccatctcctccccttgaaagcgatcaatcatctttagattaatactatctacacagtcgttccgtgtggataaaatagctctggatgtgatgtaatttggatctgttaggcaatcattgagcatgggatagacactctcaatcaatttatctaggtcactatcatctcctgtatatggcacacatatatcgtcagggagatgtatctcactattatcgttggtctcctcagtgccattacctatccgtagtaggtattctgcaaaccacggatcactttgtgccctcatgttgcgcacgagctgcaagtgtcgcatgcaatcccagaggttggacctgcgcaacgatgcatctactatctgagccctagacccctttctgacaacagggagaacttgtctaaaatcacctccaaacacaactgttttcccaccaaatggaatatttggtttgttcattatgtcccgcatactgttgtctagtgcctccactgcttgcctcttggtcatagaggcttcgtcccaaatgatcagtgatgccatctggagcagtttggccgtcccactttgttttgtgaagctgcaaatggcaccatcatctatccttagtggtatcttgaaccgtgagtgtgcggtccttcctccaggcattatggaagcggcaacaccagaagtagccgtcgcaattgcaatctttccttgtttacgaaccgtcgcgagcaatgccttgtataggaaagtcttacccgtgcctcctgggccatccacaaagaatacggctccttcattgtgatcaactgctgctagaatttcatcataggcagccctctgctcagtgttgagggagttgcacaaatttacgtcctcagggtctactttgatcgtagattcctcaatgatctccctaggcacaccatttgttgtgtcatgtaactcatcaatctcaggaagaggaaacgatcgtatatctttgcccattgattgcaacatatccctaatatttattaaaaccatttgttgaactgcatgtggacattggcaatcacgacggaaatcttctgacatagcctcaaggtgattgttccagagggtacggatgtcgctaggttcacaaaacaccagaattgttgcaaagagccttcggagtgatgacggcattcgaaacaattcggcttctgtgagacattcatctagtgtattgtctgcctcaatcaaaccccttttctctgcagcttcacgaaaggatggtagtattttgccatcaaatgttcgtaaatcttcatagcatgttgcgcctgtcacgtggttcaatagaactcgtagatagtatcgttcaccttccgctggatgggccaagacaattctgccaacttgatggacagctattttccttttttgccaaaacttcttccctttgcctgtttgccaagtataatactctggaaaatcctggtacaagatgccccgagcttccttatataacctatttgcttcaaagtatgcagtcaacattgatttctcggcaccatcctcattgagcacttcctggatgtcttgtttgcctcgatatgcaaccatgtgcatgtttggaagatgaagcggtagttgcaacacagcaggatgtattttgcttagatcaaagccatagattctccataatgcttccgggggtgtcacccatcgtgcgtccctatattgcctgatctcatcaatgtccccctcgttatctaccccatttacagacacagatgctcggtcatgacccttgtaaatgtatttgaacaggtacttcacggcctttatgcttgagcacacctcaacgtttatgtggcaattaaacatccgcaagaggtaagggttgtaaggaacaacccacctgttgtctagtggacattttcgtactataacagtgcgaccatcatcgcgtctcctgtatacagggtaggagtctttgccttgaatggtagtagcgttgaaaggtctgggataatagttcttgcaagatgaacgattcttcatgcacgggcaattgtggttcaatgggccgcaaggaccatgcatcatatgtttgacgaccattgtatataactctgggtatctgcgttggtctgggagctcggcggagatgattctatcatattgctcagcacacgtgtacttgtatttccctgtcatgatcaataagaagtgggcgtgtggtagaccctttttttggaactccacaacataggtgtaagccttaacagtaccaaaaatgcttttttcaaacaattgcttcttcatttcttctagttttgctctaaatacgcgcacgatgagatctgggcgatcctgaggagtctgcccattctcgagttcacggacgatctcttcccaattggggttgcaggtcatcgtgaggaagacatctggctttccatattttcgaactaaagccattgcatctaggtatcggcgcaatttatcccgaggccctccgataaatgatgaagcaaggaccgtccgcttgcctactgcattccctctgttctctccgatattaatgctatctaacaagccttggtatagatctgcccttatctctttttaatgattaaatatgtagtctagccgcgagctttcaatcttgatgtatgtatcaaccgcaaactgttggaaaagacgtccgccatgcaatattgggttgaatatgccaggtcgcatttggaacttgtagcagtagtagtctctcacggaaacacacagtctgttacttgaatctgtgaataacatcagattagaagagagcgacgtatgtaaacatgtgtcataacaaaacatggtgttgaaatataaacctgggttctcgtcattgttgttgcgattacgacgagccttcatcacatcttctaggttaacaccaaactttggtatatcagcatgccaacccaattcacctctaggaaagaatagcggataagacaacggatcgtagcatccatagtatgaccggatgccttctatttcgttgttgttcccttgtaggattacactcttatcaaatgtttttcgtcgctcgtttccctcgacccaaaccgcagccacctctgaagttattggcgcgttatacgttctctgatccaaccattggtcaaggtttaacaccacacggtagtccttgagattctcgacttgccccaaacttctaaactgctcagagtatggattaccacgtagaatgttggttatagtgctgactacttgttgatcttgctcgtatagatctggtcggcaacggcgataccgatgctctagggtaggatcatcatcatagaagtacaattccagatgcttagggtttgaaccattagtaccaaatgaatgtatattgtgatacatctggccatgagctcgaaacgtgtaaataccactattcctgatgtctgttgtctctctatcaaggtgacaatagagagaagtgaatgagaaatgtccattgaaaaaccttatgttgttgcggaaatgttgggcatcagaatcattgcttgtccagagcctcatgagttcaggaggtgtgtcttgattggctagtctgatttgtccacttctgcagcagaagcccttcggctcatgctcaaacttctttgcatcacaaaattcacaatttttcacaggttccagcatatgagtgctttgtggtatgttgctatacacaagctcatcgagaacgctagagccctcaggtatggtatcggcaacttcttttatttccatgtcatcgtattcttcccaatctgaaatgattcagcaccaagacgtaagtctctgtttatgtggcagtagaaaatagtgataggattaccttgatcataaaacatgtcactctcttcgtcggtatcaacatcaaatatgacttcaccatcacctacatagaaaccagtgagtgtgtttatacatatgcttttcctaactgtagtgaaagtgaacataaatataggtgagaatgtttaccgtcatcattgatgaatgacattgatgtaggctctacattgttggtatcttgagatgttaaacacgaattgtctattgaaaaaaaaattggttataactacaacaagaatatatattgcatcagaacatgaagcaagtgtttatagatagcattctcaccagtgttctgaatgcttggctgcttaggagggtctatgtcgctggttgtttgtacacttatggaagggtcttctaatgagtcacatgtccttgtgtcccgtctaatcatgaagctttcattacgacgagctatcaatgcgtgcctttctccatgtgttacaggttttctatgtggtctagtcaaaagagggggtggcatatctgatgcaatatacccagggttctccagtgcaatggaatcttcgcttggagtgttgcgccgcgctgcacggttagcattaacctgtgctatcttagcttgcttttgctctggttccatactattatatttcaccctcgcacgtgcacgcttttcttggatagagatgcaatatgaatcctcaatttttttgcgcttataggcttcacgacgccttttaagtttattttccttatcctcattagtcatctgcgcatatcgctccctatctttttgtcttctttgttcattatgatccaagagtggggacaacgatatagatggcatgtcaccactatttatcatgctagatagagctgttgatgataaacaaaaaagttacattagttattttgttgcattattggaaaatcagatgcattattttactatttcattgtcttttacagggaaccccaaggatttgtaactgctggtgcaaaatactcactacaggtaatatgtagtattattaactacacaacagagtaatatgtaaatctatttcattgtcttttacagggaaccccaaggatttggaactgctggtgcaaaatactcactacaggtaatatgtagtattattaactacacagcagagtaatatgtaaaatgcatacaacagagttgttggattacctgggatcgacataggcgcggaactctcggtggcacactttggactgaaggagagttatgtgctgttttgccttttacccagtgcaaagtgctataatgctgcatgtgattctttgttatgtgctatgattttttatactatgtatgtatatatgcacttgttctcctggtgatgctaaccgaataggacttggtataattcaaaccaagtcctattcgcccaaacagaaacaaagtcctaatcagctcaaacgaaaacagatgggagtttgtttcctatttttgtggaatcggacatattctttttttttcccgatttttcttttaccgcgttgatgaatcggattcgttttttggatcggacaaacctgccttttttttttatcggacagatttcttttttcttttctttttttcgcacttttttgttcgcccgttttttttttttgcgatcggacaactttggtttttttcgccccttttttttctagatcggacttctttttttttcgcacttttttacgtccggtttttttggatcggaaaaacctggtttttttcgcccggttttttttttcactttttttttggatcggactttttttttcgtccggtttttttgatcggacaaacttggttttttctgcccggtttttttgacggacgatggaagcacctcttattttttaagtattttttaagtagtatatagtagatttttatcaaaaacgaccataagtacctaattgtaagattacagggactcaaatgtaaatataaaaattacagggtctcaaatgcaaaattacaaacccaaaaattaaaataatataaaaatggaatgctctcgaccagtaggttccgtttttataaacagatctttaatccggcacatcattttatttcaccaaaatttgagagatatcacggtatagattgaaactgagaggagtggtggcgggtatctcggactcaaaaggagtggcgccttttctttttcgggggaatcggatctacagtcaggatttttttcgtttctgagagggaatcggataggagtcggactttttttaattattttttcgctattttttttcacggagatttttttcgtccttttttttggcacgtacggaatcagattatttttttcgctttttttttcacggagatttttttcgtccttttttttggcacgtacggaatcggattatttttttcgctttttttatcggacggttacggtttttttatcgctcgtctggttttttcgccaattttcgctggttttttttcgcctttttttttgcagggaatcggatttttttcgccttttttttgtgagacaattacggtttttccgcccggtttttttctcgctggtccggtttttttggccggttttttatacggacgatggaagcatctcttattaataagtagtagagatgcatatgacaaaaaaatcttataaaatctacgacatataaacctgcgcctgaataaaactggaccataggtaggattatcagaaaagtagtcttggtataatctcaagtgtcgtgcttctctgttacgatcaaccacttcatgtcccatgacagacccaccatgttttagagtattggcggagtgacaatagctatgcacgatttgtgccgcagcaaaaaaaaaatcatcatcatcatcggacgatgattcatccacaagccgttgaaacgaggagcgaggacgactcatcatggatcaaatcaactgccaaaccattatttgtcaaaacaaattaggtttttccccttgcgatattgtcagatcaaattaaaaaaaagaatgtgattaaccggggaaaatcataacattgagggtcgcctaggatattaacctacagattgatgacacgttcatgtagaggatcagctaggctttccgtttttccaaatatttattcatcatatcaagttaagtttttctccataaaaaaattgacagatcgaaaacataacaaaataaatacaacaaagcaaaacatagttgctagcaaattttttctacctgtgctagcatggtttatacgcaccgtacaagtgcttgtgcttgtcaccaatagttgctgctcgctcgttgctgcttgctgccgttgcctggcttaccgaaaagctaacgccgccggcgctgacagaggaacagctctgcgtgcgtctgcagcagtgtgtccttcgttcattatcatatcgatgcgtctcatatagccttgtgaatggtctcagtcgttatttcacgcgcgactaggattagtcgcaatctcgcgattgaccaggcctagtcccctcgcgcgtcgcaatctcggaaaaaaattgcatggcacctcatgccacaaggcatggacggccgacgacgggactagcgaagtgcacgcatgcagcaacagtatggagatgactcaatcaatcactggttgttataaaattagtttagaaggacccactaatgatgatgtggcaaattttaaaattttggaaaccaacattttaggcacctcttggagaagggggtgtattttaggccaaattcttttttggttgttcccaatagaggatttttggggttctaattttgtacatctattagagatgctcttaaacactagaaatcagggtttgcaatttctaaaccctgaaattcaagaattcggatggtcttttatgaaactattttaaattttaacatatttttattcaacttttgaatttttcttttttcaaaccgagccagcacagcttgtgttatattaagtaggggagagtatttacatgatcaccagcggtgaaggagagagagggaagagagaaagaaaagaggatagaggaaagaaaaagattatattaagtaggggagagagtatttacatgatcaccagtgctgaaggagagaaagagggaagagagagaggaaagatgatagaggaagaaaaagaagaaggagaaggaagaaaaaagaaagaaaaagaaaaaaccactaattaatcaatgagtattaggccgattctcgcaatgcttgttgctccacatattctccatagtttgaattcatcatgaatcttgtctagtagctatgacagggtttttttcttgatttcgaaatactcgtctgttccgcttgcaccatatttcctatgctactagcatatggattgatttttttttgtttggctttgtccttcccaccttgatatgttctcttgatccattagttcaacaacggttctttttcatcatgtgccaggccaatttcattgcagttcagtctacatagggccctctcccaaatatgtcgtacagaaggacaatccttgaagaaatgttgagcaatccttgaagaaatgttgagctatttctagattcctataacataattgacagaaatagttgtttgaccattgtttgatatgtagtcgatccgttatccaaatcctattttgcagcagcagccaagcaaagtgtttgcatttggagggagcccattgcttccagattagttttgctgcaactgagcttatccttccattgaattgtgttatataggctaatctcgtactatattccccattgctcgtccatctccaagttagggtatcgtcaacaccttccgtgagggtggtgtcattactccaaacttggttgaatacctcaaggtactccttgactagctgaactatgaggttgtgcttgatgtcttctatccattggtcattagttagtctttcctgcactgacctttcttttcttttgacgtacttatatagagttagagccaattccttgaataaattttgaccaaattcacaaatattttagaaaatccaaaaatttcggatgagatatatttgcttggtggggttcctgaatttcagaaccaaaatttcaaaccatgctagaaattaccacattaataagataaatagaaaatttctaagccggagtacgttatagagtgggttaatattaaatatttggacggtgttgattaaagtaaattaaggtgagaattaagatgggtcgaataagtaatgaattacggtgtaagagatactagttaagattaaaaaagcatggatgttccatctaaaacatactatttctttgtcatcaaaaccaaaggatttaactcatctccctataaaaaaaagaaaccatatgcatgcatacaatcaattagtattaaaatgactgcttggtttctgttaataatttaatttagcacatagggactacaaatataataatattctttggaaaaaaatgaaatatgcttaaaacttttggattaagacttttggatgaagggagtagttgacaagttggatggaggggtagctgacaagatgatggtgttgggaaaaaatatcttgtacaaattgcagcatccttcatcccgtaaaaaaccaatctagtactggatgtgacatatcctagtacgatgaatctggacatataatatattacatccagttctagattcactttttttttgacggagggagtatatggcaccgaagcgtggtacctgcccgaagaaaacatcccaatccgaaggacacctgctgctactgcatatgctaattgaagaaaggttttcattcaaaccgtctgaaatttttaattgaaagttcaaaaactcaacttctttgtagactttcaatataaaatcagaaaaaaaaaatatccaagggagcagggataggagcggtcgagatccaccgccacgttcctcccccaccggccgcattcgccgcgccgatccttctccacattggcaagtcaagtgtccacgacaaatacatgtggaggaggctggcgagcggcacaccgacgaggcagttggagcggtggaggaccatggtgccgggtgctctcccttctccagtcaccgaaatcggatgatggcgagggtgtccctccagatgacatcggcggtatcggggggagagcgacgggtggtgctaagaggattgcggggaggccaaggagaggagcgaatcagcgtgggcgatggtggagtgaggtggtggtggcgatgggtaaccatggaggttagggaaagcgaggtcggcttcaggatgccgccaccaacgagcgcccgctgtttgtccccctctgcacgcgctcgccggcagaccacgggtcccgcgggctcagcggctactggcagtgcgcgaagagaccaagccggtgatgctcctccctccccgccccgaccccgctcaccggcctctgccgattcggctttcgctgcgcctcccccaattctgcctccgctctcgctcgctggagtgtcggcatccgtgccagtcgcatctggggaagaggggagaaggagaatgataggagatagagaaagagaggggatgaggtggaggaagtggggcccactaatatgtgggtcctactatttttaatcttattatttgactgacatgtgggcccacatattttgttttgatttttaaatggtgaaattttgctttatattccacgtcagatgaagactgagtcaaattagccacgtaggcgccatgtcagctaaaaccgatgtccaaaccgttatgggacctatattgcatcggttttggtagttgaaggacacgctgtatctggttttccggttgaaggacgaaagtcggatttgttgataagttaagggacctcaagtgaatgtattccttattcagcagattgccgctgcacaaaaggaataagttcactttgactcccttaaaagtgacccgaatctaatccgtgaccctcaaccgcaaaaccaaatagaataactacccgaactattaaaaccggtgcaatttgactccctcggcggttttgaagagcggtttcgctgacatggcttctatgtggcagtgttgacctggtctgcaattgacgtggcgcttaggtggcattagaattaaaaatatacatctgggacccaattgtcattcacataaaggaaaattttgtggggtccactgacatgtgggtctatcctttcttcctcctccctctctctccccattatctctctttccccctcttcggcagttcggcgagcaagggccagagcggcggcggagtggcagcggtgggcaggagggcggcggcatcgagggagacgagccagagctcgagggagccgttggcgcgccgccccacgcttgcgggagctccatcaggacaacgacggcaagtagcaaacaccagcaggccatgctctaggggctctaggaggcaccgacaggatgaagctcgacgaaggggctctagggtggtggcgccagcagatggcagtgatggagcacgagtcggcgactggtggtggatggcgatggcagcgggacagagcttggcactgggcagaagcgtcaccgcaacaggcgggaccagcgtcaccgcaaccggtgggaccaacggcggcgcctgacgcccgatgtaagcgtcgcagcaaccagcgagaccagtctccgctccagggttgtcgcacgccaccgaagccgccgctcgacctgccttcgcactcctccacctccctcctccccacccacgccaccgaggtcgccgcacactgccggggccgctactcgactcgccgagttcctctcccgctcatagagcgcctccgtcgttgacgtcctgcccccgccgctgccgccgcggggtttcatgaagcctcccgccctcggcctcggcggcgctcaccggctccggattgacgccgccagcacccctcccagccgaccgcgtcgcgagacacctccgactccccctctacagcgacgacgatggtgcccctccctgccgaccatctccagatcgatgccaccggcgtgagaacgcccttgcctgccgactgcgtcacgaggtgaagagaaaggggatcaagatgtggagagagaagggagagagggggaggaggaagaagagagagagatgacatgtgggccccacatgtcagtagggcccacaaccttttgtgttgtaaatgacaaatgggtcccgccgatatttttttaattctaatgccacgtaagcgccacgatgggatgaataccaggtcaacaccgccacatcaggaaaaccaccctcgaaaaccgctgggggagtcaaattgcactggttttgatagttcagggagttgttctatccggttttgcgattgagggttacagattagatccacgtcacttttaagggagtcaatgtggacttattccatgcacaaaacaaaccaaaacaaaccatggactcagcctatgcgttagcccccaaaacaaaccaaaccattccccattccactccaaaccctagacaccgataatgctgggtgtcgggcgtccgatgggaggggagaaaaatcggacatgcatgtgcctgccattacattcaaagaatctttccccacatgctcacatctctcatttcttcaaaatattttctctcgtaaactatttatctaatctacgatctgattacaccactaaattcgttacaattaaatatttacaacaagaccacacatgattatatttcaacaaaaaaatattttagttttttattgattttttttaatgttgcatatggtctcttttgatgtttcaaccagtagttttacaatgtttcagctagtgtactcattatgtttcactatgtacggattacatgttgcagtggattttgatattatggaacgcgccgttgcaataaatcaccgacatattttggaaaccctctattaagagaattcgtttcattttttgtttcacaaaaaatgtttcactatgtatagatctaatgttgtagtgaattggaacattcttttgcaacaaatcacccatatattttggaaaccctctattaagagaattcgttttattttttttccacaaaaaatgtttcgcctagtgtactcataatgtttcactatatatggatcaaatgttgcagtgaactgaaacattctttcgctatttgccgaaacatttttttataaaagatgaaacaacgcccattttaaacgattgaaacattttcgatctacttagtgaaacaattccgatatacttggtggaacatcgtgcaacattgaaaaataattcaataataagctaaaaatttttttgtcagaatatatccatgtgtggtcttgttttaaaaaattaattgcaacgaatttaatagtgcaatcggatcatgatttggataaatagtttaagagaaaaaatagtttaaagtttgcttaaaaaccttaaccaccctaactaactgttggttactagtatatatgcattctatgcgggcaggctgaatttattcagagaatcttgttccatactatgcaggctgcgcctgcatgcgctggtggaggctggggctggcgtccgatttctccgtaaaaaattggatgtccgatctgtagacgcgtcccctagacaccatccgcaaccgcagaggcgccgccaccgccccacgcaaaaatattaggcccccaacatggcggccttattccatgcacaaaaatattaggcccaattgagggcccattccactttgtcacttcatggcccatctccaccactccagtcctcaatcacgccagccgccacaagcccacaggccacaaccctgcgctctgcatcgccgccgccccgccgctcctgctcccggcgtccccgtcccctcctcaccacgccgcttccccatccgccgccccgctgcacgccgtcgcgctcccagccgcttccccattcgccgccccgctgcacgccggcgcgttgggggagttgacgccacggcatttccaacatccctttgcaccgtcatcgttgattttcctggcggataagtacaccaagccagctccagattctacccatcaagaccgatagaatttcaggtgtttgcttcctctgttagttttgcttctttttaaggacatagtataggatgcagatgcacgtctggtgagaatatccctttgggatgaaacaaggtatgcggtgtgtgcgaattaacatggtagatgtcatatcaataaactcctgtgttgtgatttaaaaaagccacttctgcatggttgaagctttgtgatcttatatgcaaagagaggtaaaatgaaaataccaaccttgctcacaatattcatgtttgtgccgatcctttattagtgtattttattttgatctttgtgtcaggccatatgaaacacttcttgtgaacagttatgagcctttgattgaatgtctcatactgaatcccgtattttttaatgtctgtagttttacgacaacctctccaacaccttaaaaagatgttgtttggaaatgagactatctttaaagtcatcaatcctggaataacttggcagagtaggattggtgaactattagcataccattcttttgaatcaatgttcctatttctagaggcaagaaaaggagaaagcatgtctatagcccttgtaattacatgtcaatgatcctgtaaattatgattggtctctactactgttgtatgtgctacacttatttttgagagaacccttctgatagctcaagcaaaactgatcatgcaatgacttttatgtgttagcaagttttgtgtgtaaatcagtatgctatgaggacaagtataattaattggtcagcatcattttcatttacactataaagttgtttcattctcagaaggaatttccttttctgtttatcaccattgtcttatgaaatgttaccgtaacgttagtacaggcatattactagtgcacttacatctaagtatattactcagtgattcttgtcctattcacaaaaacatggtcacttattaaacaaatttgatttttcttctgtagtcttggtgttgattgttcattgcttacaaaaagagcacaaagaaaatttgtaacagtcaaccacatagcctagcccatccaatagatggacccacttacacatagcactctatttacactttcatttttgtttcccgtaaaagggttaacctggaaatgatatggttagatatacaaagtcttatatgatggtttcactcatactcaactagcaaggtgtcgtctggtcttgtccctctaggcctctactttgatgctgcttgtgtatttatcttctagaattcttcagttgtcttcttcattgtagttgtgatgtgctttacctccgtagttcagtgatttacggaacataaactttacattctttctcttgagctccgcacgccgcgtgcctccacgccgcctcctcccacttaagcctgccagtggggcgggtttgattgggtgaaatgggctggatgctgatttggatggtgatggttggatttatgtcacacccagaaattcccgaatagaattccaagcagaatgtgcattaaaatccctgtccagaaccggccagggtacacaaacaacaaagttgacatacagatccacgtcttacaaacattataaaagtcttacataaatgcaatggaaaattaaagataactagagctaagccttgacttaagattgcagcgggaacaccactccacaggcatcctctatggcacggacgaagcctactcctcggagaaatcaccatcggacgcatactcgaactctaagggttgggagatagagcaagactgagtactacccactgtactcagcaagtcataccggaacagagggtatgatgcaatatataaccaaaggaaggctaaaggggatcatttgcataaagctggcacttataaacagtagtcgaatgcagtaaaacagttgtaataattaaccaatattaaaccaatcactgctcaacgctacaccacgttgagacaggcccaaaccaccacctgcactaatcagttccattaaccaactaggggtgagactaatcacggtgaatctagttgaccgcccataaccgcgggcacggctattcgaatagttttactctgatcaaaggtgtacaactgtacccacaagacacagccccacgacacgttaccgtgcgccgacatgccaccacgacataccggaaagaggccgtgacaggacccttcgcataaccccctctaaccaaacacaccacacctcaggtttcacccccactcctcgcaaggcagcgggcagtctcctctcgtgcctaggtgaatccggaagcgacaaaggccgtcgcagggcccatcctactccatcatgcccacccttgcctagatgcgtcagctagaggaaagctacactacaagcccagccgttgcccacgctggcttgtggtaagtacgaggaattcttccagggttttccgcgaaccggtccttaattgccatgggcgcgaccatcaaaaccatgcacccacagcccaccatttaatatattttaattaaccaacaccagagcgatggtactagtccaacaccaatactagaatctgaaatctatacattaatgtaattcccccattgtgtgctagttgaactaagcatggctaagcaatccctaagccaacatctagtcatgttacatccccaagctaacaaaggaacaaggtaaataaatagtatggccgagacaataggtaatcatcccatggtatcattataaaacaatgcagtgtttaaaggaaatcaatagagcatttgcaatatgggatcaacatgttcaagtgacaagcatgacttgccttgctctatggctggagggacctcggcaactatctcgaagtacaccggagcgtcaggagagccggaatctacgcgacatacaaggcaaacaacgcaaacatgctataagactactgaaacagataacaaaaccatttttaatggattctttacatttttcttgatttactgagacttgaatgggcttaaacgaagcacggatgaattttctatgaattttagaagattcactgtgtttttactataaacagaaaaatccttaattaatttattgtgcaattattagccctggtgacgtcatcagagagggaaagggtggcgccgacaggcggtccccacaagacataggctcaagggcgctggcccatggtggaccaagtccacgggaccggggaggggaggttcaccacgtggcgcacacgtggcgaccacgcgggcggccggatggacggtggagggggagggggcggcacgcggccggcgcgcacgggcggctcaagccggcccagcggccatggcgcggcggcggcacggcaccggcggcgaccggcggacggcggtggcgtggtggcggttatgcagcggcgctaccaggagaaaagagagggaaaaaaggagggggcggcctcaccgaaggggtccgaccggcgtggagggagacgacggcgaacggcgacgaggaacgatggagggaggtcgacgagcggcggacagggtccgggacgacctaaggagcaaaatgggagaagttagagagggagagagagatcatagagggcggggacgccggctgaaggcggcggccatggccgaactcaccggcggacggggcggatggggttccggcgacggacagcgtcgatcgagcggtggctagggtgctccacacgatggcgaatgtagtggcgtcggcggcgaggctcgacgcggcggctagcgacagctagcggcggccggagagcggaaaagcggcggcggcggcgggtgcagggtgctagagcgaagaagggcactgggaagctcggcgaaatggggaaaaagagagagggaggggcggtggtgcttaaataggggaggaggggtccggacgtggccgggagaggcgggaatcaccgaccgacgtgggggagtgggagaggagagagaggcgggattcgttcgaatcccggccatcccgtgggcgcgggtgagcggaagatgggtagtgggggagcgggagacgcgggggaggcgacgacgtgggcggcgtggcccgggaggcgcgggagcgggcggttgcgaggcggcggctgcgggcgcggacgccggctggaggttgggagaggacccaacagttgggccccacctatcggcgaccccgggtgagagaggaggcgcgggcggctgctgggccgtggccttcgggaaggggtagggggaaaaggaaagggctggcggcccattaggaaaaaggaggggaaaaagagaaagaaaaaaaaagaaatgaattccagggattaaataattactcatgctcatttttaatttgttaaaattatttctagagctctgaaaattccactaaaaatcctatattttgacttgtagaactcaaaaaaaaatcccacatgtcatttccgattattatttgcattaattcaattagggtttctctcttgcttttacacaggtaatttctcgagaccatttattaatttgatttagatttgggagaagaactttagggtgtgacaatttaagtgggttgatattaattttggattgaagcggattggcctgtgaagaattgtggtttgtgctggagtggatgcgggttggtctgagaagacaatccatggactcagcctatgcgtcagccccaaaacaaaccaaaccatttcccattccactccaaactctatacaccatccgcaaccgcagaggcgccgccaccgccccacgccgcacagctgtgcgcggtgcgccgccaccgcctcgcgcggccagcgccgcgcacggccaccgccgagccccgtcaccgccgttcgctgccaccgccgagcgccgcccgcgccgagcgctgccaccgccgcaagaaagctggtgtgtttctgttgatgtgattccaatccaagagactggattgcagattttctgcttgatcgatctggaatgtttccctggccatgaatttgtatttgggaagatttttgttgcgttttggattctggtgtgaattgaattgagaagggaaaacatcgttacaacatttttctgaattctgcatttttgtttcagagatgcatgggactgatcccttagtactctgtctgtgtttatgaaccaaacaggttgcatgtctgaattcttctgcatataatggactgaagcatttcgtttcagatatgcatatgtggactaacacccagtatgttctagtatgttgcattcttcagtttgttacacattttgtttcacaggagtagtatgtttggagttattgagttaagttaacccaatccttccctgattgtcttatgctttcttctgcatcatgtagccatttagctagttgacgtagtagttgtgcagttcttttgttctgtggaggatcatgtttgtaacttgcagtattaggtgtgtttatgggctcctttggagcagcacaatattcacgtaacatccacgagcgaatcaaaggcgtaatggctccaagccctctatattgtagctgggatccatggattgaatccattccagtgaagtggaccgaaccaggggcgggcccactattgattcaagggtattcagacgtatacccaagatttttggataaaaaataagtatatgtactctatacctcgtatatgtattaagaaattaaagaaaaaggctaaaactactcattttgggccctgtttcatcgtttcttctctattgggcctaaatttcccacttccctcccctttcatctcagcccacaatcagtttgggccacaactagttcatttcccctcctcgcctaggcacagcaaaccaaagccctaattcccaaatcggccaaatcctaaccagaggaccgaggacgtgcgcggtgtggcggcgaggacgtgcggcagtgcggcggcggcgacttccggctgcgtcggcggaaggcggcgccaaggcgggtaggagcctaggcggcgcgtcgggcggcggcgactgcagtctagtctgcagcgtgctcgtcggcggctgcggcggaggcttccggctgcggcgtgcgcggctgcgtcggcggcaggaggcgccgaggcgtgcaggcggcgcgtcgacggctgcggccgtgcggcgttggggctcggccaggcgtgcaggccgccagtccgccaggccaccacacaggtacgcgatgcggcggccgaacgaccacggctcgccggcctgtcatggattgcgtgaggggcttgattcattgattcactgcattgatttgttctaggtagttcaatagtagttatgttttctggtggcgacggcttgtttcattgatttgttctatagtagttcaatagttcactagcaccgaaggattcaacttcctcagttcctgtcttctttatttttcagagtgttaactgttaagtgtatatttattgatagattgatagtataaagctgtaaatattaggaatttagataacttagaaccataatatttaattttcagtgtgttaaatttatatatatgatgatagtatgaggctatatatgagctgttgttaggaacttagagaatttagagagggtgttttcttcgatgaactatataaaaacaagaagcaagatgagcaacaatctgcatttattggaagagaattttttgtacaagttaaaggatgaggacatcatcactcatttttaaaatatcaagcattgaaaagttctcctctaaattgtaagttttttttatcattttaccattttctatcctttacatgttatatatgttgccactttcatatgtcgaacaattagtacttatatatgttaaagaatttggacttatgatcaattctatcaatttataaagttatggccaattttgtgttctatatgctataatattatacaattagtaatgtgtaatattataccaattaattattggacttctggaagtaaaaagaattttgttttacccctacctatttcgaatacctaacctctaaatcctgggcccgccactggaccgaacccatttttctgcaatggtttggggtgggttggactgaaatctgatgtggggtgggttggtttggattttggaggagaggaaatggggtgagttggtttggcatgccattccatgaggtgggttggggtggattcaaattggatcacagcccactggcaggcttactcccgctgcagccgccgcttccgccccgtgctccaccgccgacctcttcccaccatccgcagtcggcggcgccattgccgccttgccgagccaccctcttccccgccgccgacggcttctctgtaggccacggcaccggtgaaccgcgccgtgggggtgtgaactcttcgcacgagggtcaagggtgacttcatctaattttttggccgtctcttcgctttcctcccattctcttccccggagacagttgtggagctccggcgaacatgccatggtgggcctggcgacgagagagccgaggcgaatcagcgggggacaggtgatgcaccccggttcgatctccttttccagtttccccaattctagctagcagccaagcagaagggctaggggaaagcagagaatcattgatccctctcgtcgccgttgctctcgtccgcatcacccacattattgtccgcgtggtgtgtgtttgacgaccttccacctggtagagttaagagtttacttcctccacctcgagcgcatgctgttcgatgaaatgcctagcaaggttaaggttcaggttctatcactttcttgtttcaaaattgagtgccatcctgctcttctttgctattttgcacgaccttgtgaaacaataataaaagaaaacagtcttcaatatttggttgtagttctacatgacaagttagttcatctttttggtattacagataacaatgcatcgaatttctttgttgcagattgacaagtcgacattgattcacataaccatttttgcatgccgatggtgttttctgtgctctaaggtctggatctgaatatacaactgaatggcatctatattgtttggtcatagaaatctgtgtgtctttcccctgagaaggcacatattggatgaggtataccagcatggtccttataattgtaccatacagaggaggtggaaaaagccagttgattcagcaagaactcgtctggagggcagaacaagggatcataaactggacaagctgatgattcagctgaagaacctcaggctggctttggatttacatgagttgatatctcagcagaggaacaaatatgcatctctccaactcctctccaggtggagacatgaggtcggcttgaacattgagataggcgctttcctcaagaaatatccccacattttcgacatttatgtgcacccaatcaaaagaaatgaatgctgtaaggtcaccccaaaaatgtctgaattgattgcacaagaagatgctgccatcagggaaaatgagcctgctattgctaagcggctcaagaagcttctcacgctatcgaaggatggaactctgaatatgcatgcattgtggctcgtaagaagagaacttggcctgcctgatgactataggtgctctatactaccaaaccatcagtctgatttttctctaagttcccctgatactctgacattgatcactagggatgaaaatcttgctgtagctgatgttgaagaatggagagcaaaggaatatacagaaaaatggttagctgaatctgagacaaaatatgcttttcctattaactttccaaccggctttaagatcgagaaaggttttaggggaaagcttgggaattggcagaggcttccctacactaaggcttatgagaagaatgaattgcatccaatccgcaatatcgagcggctcgagaaacgtattgttggcattcttcatgagcttttaagcttgacaatagaaaagatgataccacttgagaggctgtcacacttcagaaaaccttttgaaatggaggtaaacctgcgggaacttattcttaagcaccctggcattttctacatctcaaccaaaggaagcacacaaactgtccttcttagagagagttacagtaagggatgcctggttcatcctaaccctgtctacaatgtaagaaggaaaatgctagggcttattttgtcaggatgttgtggcgttgatgaaatggacagtccactttggttttctgaggagtacaatcaggaaagcagtaacgagtcatagaatcacatgtgccagacaaataccgaatgccttgttggaagctcaaagtggcatttgtcaaagaactagccatttttaatctctgacattctttacacgagtacataagttgacctaatgatgtcaccactagagttgctgataatggtatgctactcttgagatgtcagtggtagagcatcatctgctgaggaatgtactgattgtgcaagctaagaaattcagttgtcctgaagagtgactagtctgcacccagggaagaatgaatgcatcatggtgctttagcagctaacaaggaggaggtgcttgagcaggatcagttgtcaacctttgttcctgttccacagatctattttttatgtacaacactgatttattttcactgcagagatagctccaatgaagatttaagggcagtaatttatgctttggactggtctatcataaatacaattatcatttctctagtggaagttttttttcttaaagagccaacagaggtcagaagatcctcaaagcaattgaaaacttgctgattgaggagtgcggcaatttcttccatacacaaatctctactcagctcgtgctgtgtacaattacatcttgatgtcaaattttcatgattattttattttgttgatcagtgaatttcatatttcagtgatagtaacaatgcagttgtttggaatatgatgtattggatagtcttgaatttgcaaggggaagtgcagaatcaacactgggctctgttagagctgcaatggggcaatctgaacggttcccgtgaagtatgttgcaaatgaagattgtgggaaggaattttaccaaggtataatttttattaatcacagtttgacatatcaatgatctcatttgttgtcaatgccaatattccatagttgttttccttaggtttcaataacttaggcacatttataggctaaaatgatgtgatggccaagtgtaattaacatataatctcttatcatttatgattgttttctgttgatctgcatatcttaaaccgcttatttatcttaccagtttctgaggacacattttctttgcacatgaagctataattgatcataacctccagaatgaagacatcctagttgcctccaagttgtccatgatggtttctaatccaattgtacaggagactatctcaagttctatgatgctatatccaaggcctatccagacattcaaatgatttcaaactttgatggatcatctaggccacttgaccatcctgctgatttgtatgatttccatgtaatcttctttcctccaaatattttttccattttcaccgtttaaattatatctcatgacttctaagagacttctcattgtgttttgttaagatctataccagtgccgctaatctttttctcatgatatcacatattgggcctaacttatgtttaatgttttagcccttgtttggatggtctggaatccctggccataatggcttttttttaatttattctggcaatagatacatccttaaaatacttatataaaggttggtcttgcttgtacctgtcattcctaactttggtagaatatttttaggacattgtttatttccatattctacctgagtaggcatctttatttattaaattacttcagaaattatatcagcgtatttgtttattaaattactttagaaattatattgaagtcataatattatatgtgcagattccattaatgataatgtagtagtgtcacaacactttagcaggctttgtttatctgtatcattctctacttctcttgcatctcgatattgcatatacagtaagtatgctacaaatggctatgctgtgaccttgttccaggtatttgtcagtgagtatgctgttaatgaatgaaaggatgctagcaatggaagacttcttgcttcactggctgaggctgctttccttactgggttagagaaaaataggtgatacctctcactttccttcctctctttggatcaatctctcattccatattcttggggctaactgaatcacgcatgtggctgtatttagatcattcatgacttctccaggacaaatgtcaatattgccatggataattaagagtttatgaccctattcagataatcaaatttgaaccaaagggaaaaaatctgttcagaaattacaagataataaatatgcacatattgatattgtaaatactagtagtgagcagcaaaaattaatactctatcatgaatatactagaagtatctgtcctgtttctttgcagtgatgttgttcagatggcaagtttatgcaccactcttcgtaaatgacaatgaccgcatgctaatacctttggctttgcactgttttcttttataacattcttgttggtcacaagttcgtgagtttgactaggtctgaatgttatgatcagctggaatccagatgcaattgtgttcaattcctggcaacagtatggaactcatagttattggatgcagacataatatttccgtgaatcaagtggttctgtgattcatccgattatgatcagttctggctactctgatgcgttggctgcatctgcaatcacctggcaagacactcagatatctttctgagagtaaaggtagttaacaattccagtttctcctaacttacataccaataccattgcagcgattcattagacaagcccctaaatgttttgaatgatttagttacaacgatataaactgattgaaccactgcatgcttgcataacatctgtttggactttggattttagaacatatattcatcttcaaaagatctgtagatagtaaactttgggccaaacactgtgaacctcacaatatcttcaagctgttgtcacatccggcaacgtgctggatgaagattcatttagtgaaccaaacaaggtaagacaaccattgcttttatcacaagctattcgtttcattaccatgcactggatttagcaattaaaattttagtctgccagcgcatgtgcaagccgccaagccgtatgtcttccattgtctagcaatcacctttgtaggtttatctgtaagctttccaggaacctgtttatttggttatatcaggaattgtttcctacaatttctagagaagttttatgcagaaagaatcactttcattctcagttgttggcgagttcgtctaagttctaaagtatcttgtgaacgaagcatgcaggtcgtgccggtaacgagcgagctgccagatgttctaaagtatcttgtgtttagttcagcgcaaagtttggattttggttgaaattggagatgatgtgactgaaaagttgtgtgtgtatgacagattgatgtgatggaaaaggacttaagtttggatccaaactttggatctaaggctgtatttagttcagcgcaaagtttagattttggttgaaattgaagatgatgtgactgaaaagttatgtgtgaatgacaggttgatgtgatggaaaaggactgaagtttggatccaaactttgaatctaaacacagcctaaacacagccaataaaccaaatagcataacttcatgtataaatgctgtagtgagagagggtacttgtgcttatccaaagatggcggcttcgatgagaagggaattcagcccggtcttattgagttagaaaaggataatgacgcagaatgtccttctgggtcccaatttgctccctgttatgaaagcacgataaaaaatcataactccaaaaattagtcataacacccatatttcattaaatattagtttaaggtgggcaacgtatatattacaagtaaatgggatatgattgttgtaatgatcttatgtgattagtgtgatatacttggcaatgttcaaatgaaactgagctttatgtaatatttacagtctataaagtaaactgaagcaaaaaccaatttttgaacaaccaattacccttgttggcaaacacaagtatagctgttggaattataatgatcagctgttggaatgataatacattaacaactggtaaaaaggtacggcaaggtatgcataaatacaaaataaacccaaattcagaagcttgatacaggcatgtttaaaatgtacatatgatgtatcaatctgtatactatcaagaataaagctacatatacaaaacatcattttccaatggatctgagataacaattccttaaattaaaaacaggacccaatcctatatatctataaagctcatccccactaaatgtaattaatactaattctctcttctctcatgaagccacatcatcttaattgtttttagcccttggatgattcatcaagggtgcaaattgcatctcttctccctaaaagccacaccatataactcaaccatttataacttttgaataattgatcgaggtacaaaatatacaagcacatgaaagaaaatcatatagtaaataagatattttttctacaactcatatctaactattttatcacacaattctcccgcagcaacgcacggggtacccatctagtaatccataacatgcaaaccatttgtcctttcatttcttgacttattaagaatccattccttgcaacatggtaaatgtgaatgtcaaccggcggcgttcctctttgcacataggcgagatggaggcacgggaagctagcatgtctctgcaccgatctacggtgaggcgagacggtcgatattatgcgttcaaggcagggtaatatggggaggcgatggctcctctgccatcatcaccatctggatctgggccgcgaaggttcaagcaccttctctagccacctttcaccgattcggatcctactttcatcatcaatattgtccttgggaaagccactaatgtcacttgatgccaaggaggagatcatttttataacgccatatatctagggtcggccttgtcaacgctaggagcactgatattggtgaggcctatgggcaccacataccttcctacaggtgatatcgctactgcccctcccacactttcatgtctttgggtagactttcctagttctagatgtatggaatagctatggtattggaggcattgcttagaggctccttgctgatgtagcatccttggtgtcggatcggctttgatggctataacagcggcaaggtctgagaatgattgatttacagctcagttactccctgacattatttttgttttggtttgatgtaattcggccatggtgatgtttacataaatttgatcgacaaattgtatgaggtggaatttcaaacttaaaatggttcatcgaatggtttttgcaattttaccttaatttagcccactaatgtggcccaatgattcatttggtaattggtgtggcccaaaaactgataagagttagagcaaaagtataataggggctgaagagccggcgataataaattcaaaggctgcgttggccaaaaagctgatgagagagaggatcagccggcgactaattaagcgctagcgtcacacaatctccaaaaaatgtgggacccgttgcatgttttctacaccatacaaaatgaagatgtgatgtagaatgagagagaagatagaataaataaataatagactattgcaactaaagaaagatggatagactacttgttgtatgtattaactttttaccatggctataacagatgtggcaattacttgagtaagcggcgagcgcttctattagccttgctctttttggacttggtcagaaatttgaggtcgtaacgaaaaggatggtctcagacagagaagtatttcggctattatacggcacaaacaaaaaaaagaacggaatcctgaaaattcctgcgaaatgtgtattgtgtgtgggtgtgaacaatctctctttgttccacatgatttatttatttccttgtttacacacatgtttttgcatcaatgttagaaacaattgcctcctcaacaaaatggccaggacgagcttagctacggggagtatggttgaaatatcacgctcgtcaaaatcgtgagaagttagagatggtagggacatgaacagtacgcaccgacacataacttaaaatctaagattgcttagaacggggtatttctaattccgaaatctattgatctggatctatgattgcattgatatggagtacatcatctttttctattttataagaaaataaaaataaatctagagcttacaacctgtagatttagctgtggtcttaaagaaacacaccattctctcaatttgtacaagtttagcatcagcagcaacccatcaatcatattataatatatataatatgtacatctttcgctcgttacaaaataaatctaattctactataaatatggacataacattgtttagattcataatcaagatttgatttttttaaatcaacaagaaagaagaaaacaacaacattatctaatgctatgcaggacatctagttctacatataataatagtccttgaggtctctcgtaagtaggagtatgaagcagtactttgtttaattaccagctaagctaacacttaaaaaagaattgcctttgcaattttgcaactagtactagttcgtttactctattcagcacactttccgtagccaacgcaaggcacttcttgaggcactgcatcgcgcccggccgcccgcgggtctcgactagcccagccgccgcgccgccctccccgtcgccgccgccgccgccgccgtcgcaggtcgccttccctgtctccgtccccaccagccgcagcccctccccgtccacccgccgcgctgcgacggccggactgccgccctcccggtgcccgcaggcttagtgcggcggccgccggcagccgccgccacaaccggctaccgcccgctccattggcccaatttagaaggcctgcgaaatctcggtgagctctctattaggtttgtcttggttaagaacacagtggagtactctagccaagagcccgtgcgttgcaacgggataaattgtgtttctagcttattaactcaagtaagcacatacttagtttaagtagtacttttatgatttttcttatttaacaagtatggtgattttgaaatttggagagaaccagcagtgaaacggggtggagggtggtgtaacagtatagattgtgggggttaaatttcagtggtagagttggtatggtagaacgggcgccaccaatattgatattttaagtagtatagatatgtgacacattattgagcaatagtttattcatatttactgagggggatttcttctcccatattggtgaggatgatatagcaaagaattccatggctgtgagaaaacatagagcagggtagtactagccctgtaatatctatttataagataacagcgagatctgccccctttgtggcattgagccagagacggctcatcacctactcatggactgtgccttcgcaagacaagtttggagctccatctggagcaagctcggccttcacatgccttcgctttctctttatccggggctattgctagattggtgggaggcttgcaggaaggagctagttaaggagcaaagacgtaatttcgatggccttttcatctacacagcctggggcatctggctgcagagaaatggaaggatcttcaatggcatttacaacatggttgctcaggtcgtcgagtccatcattgctttgtgcaaagagttcgatgaagccccttagttcctagatgagccttatacgccttctcctactcgttgcagttcattttcttaagattggggtttccccgccccccccccccccccttgttttaacctcgcaagctgtgagcgtgcctacaggttgcgtggctggcttgtaaaacaacctttaattctgctcctccttatttgcaattggcagagctcctgccgtcttcccctcaaaaaaaaaaaaatctatttataagatcctttgtttttggaccatttattttgttccattttcaaattatgaacttaccttgctgattttagacattttgtgatttaacaaattttgtacacacatattggatttacggtataactgaaatctggtaagcgaagtaggcacatcactgctagaagtctacccttgcttcaaatcatatttctaatgtgtacaacacagggccgctgttcctctagctaaaagtcttggtaattgttcatacatggcctgattttggatcataactcgtgtgatattttttatcaacagggtgttcataaatcttgatagatggtagtatcatttgactgaagtacctctagcctctccagttaatttattgcgaggggcaagatcatgtcggcggaagcacataagcttcggttcgttagatgcccaaaatgcctccagcttcttgtggaatatccatccatttctgtctaccagtgcggtggctgtggtgctgttcttagaggtataaatctcataatttctgccattcgctgattcagtaatatttacatcttcgcataaaacagttttgatttatattaagtctataatgatgcagcaaagaaccgattcatgtctgtcacacaaactggatccaaacctgatgaacacaacaatatttcaagtagcttgaatgggtcctctcaggacaacgaatcagcttgctcagatggacagaaaattgactcttctagtgctcagcctaatgaagacgctgtggaggaaaacattccctccactaccaaggatgcaaaatcatgtgaagcagtaaatcaagaacaaaatacgaccactgtacagagcgtaacccctaccgaggatgagaataaggagaaatgtcctacaactgatgcagatatccgagacactggttgtatggtcaaagtgccacatgatatgtgcactggagctgattctagtcctatgttgattgacaaagtagagaatattggcacaagtgaaaatacagacttgggaaaaggttacagttacgattgtgtatctgatggaaatgctggtagtgatgttgctgctgtccacattgcaggtgaggaaccaggagcaatttctaatcatagtatgaagggggaggtagatagtgtgactgaccaaatattttctgttagcaataaaaatgtgaactgcaaagagttagatgaaagaaccaatctgtgtaaggaaactgaggccaagtcttgtaatgaattgattcaaatggaggagaggtcacagccgaatgaaggttttcatgttgaatctcatgaagatctgattgaagaattggaaagatctctatcatttagtgatgatgaagagagcttgttggatgcaactggcaacaatgaacttaatgaagctctacagtttcaaattggtagcaggagattttctccaggtagcaaaatgaatgatgcttctcgaagtgatcctcatggtcgactgattgaagaactggagagatctttcagtgatgcagaagaagcagcggagcagcatgttgtggttgtggataaggtcattacagagagagattttggtaatgagcatggcaaggttccaacttccctggttgctgaaagtggacatccatgtgaaggaaacatctcatcatatgatgatgggcatcagaaatctggtcagagttttcaacagaatgaactaacagctgatgaaactgaagaaaaggagcatggtctcttggaaaatgacagcaagatcaactgtattcatgggaatgagcatgccatggttgcagacaatgacattgcagagattcatagtgagcatgataaggatccacagttgctggatggtgaaagtgcaaaattatgtgaaggaaccatttcttcatttgatggacatctcaaatctggacaatgttttcaagaagatgagccaactgctgatggaaataaacaaaaggaggagagccatatgggcaataacaatgtgaccgactgtgcacatgaggataatgcaactgttgttggtttctcaagcttgtcaaatgatgggattcactgcaaatcacctatatttaatgagaaagaagaagagagatcagataaatacagagctaatcaactttatcagggactttcacttgattctgaggacttcatgtcaatccaaaactttatcgagtcacaaatggatgggacatcaagttctctctcaagtgggtctcccaatcaaggaaatttgtctctgaaatcatcaaccaaattcaagtttgatcgacttgagcgcctcaagaagatcgatgagctaagagatcagctaaataggctttgtagcaaaaagcgcttggagaataggtatcggatgaaaggccttgagtaccagccacaactgagtagctactacgttgaccaacatagtcaaaatgttgatgcagattccatccaaagttcctctactctagggtcctattattggaatggaaagcaaccaagttaccctccacgaaaccagttctcgccacctcattcatgcacacactgccattttgggcatgtggaaacgcacatgccacacaattatggtgcttgggatgagttcaattcgtattaccagccttcatatgctggaagctcaatcattgatcatgactcactcaattcaagctacaaggagcagaagcgagtggtgcgaaagcatattttgcggcctgtgtcaggtgcttcaccatttacagtatgcaatagctgtttcaatttagttcaaatgccatcagatatctacatatccaaaacaaagatgggcaaaatgcagtgcggccagtgctccaaggttcttgtattatcatttcctgccatacaccacgcgtgtgcaaatagcagtaaggaggtagcctcaaaatcaaacaagcacaaaggcagcatagtcgttaagcctgaggatgctgcttctcattttgctgagtcctttactcgagatcctgtcagtatgaatgaagaatatggagcatctttcacaagaagcttctctactcaagctggatcagcccttgctgcctcacaaagtggcaagaatgtttcagattcgacacttcatagactcatgggatatgattcagcaagccagctactacatgacttacgtcacagcaaggtttatgatgacggatacgagagctttgagtcaatggtgccagtatccagcagagtatccagaagaaagaacacttgaggttttgcagtgctccttgtaagcaggattataaggcaaacagttttgcggatccgttgttaagttcgtttttgaaaacatgcggacatcttgcctgcaaatagtttcacaggttttcccatggaaatctgaatccatttgatgttattgtttgtcagattctttggtcatcttggtatatgtgctgtatattcttttgctgtaaatttgttaatattcaagattattataacattttgtgctgttagtatctgatgtttgtgtggaatgtggctcaaactaaataaatgaggtgatattcgggtatttacccatcgttgctagagcacaaaacgtgataattacgtgcatcagggagtatattaagctccctccatcccaatataactgtcaccattcaccattcacttagtactgttttaactttgatcgctaacaatttttatataatttagattatgatgaaaaagtttaatgcttatgtttagtactcccttcgtctcataatataaaagataatggtcccataatataaaagataactagcaaagtggcccgcgcagattgcgcggttagcatcgctataaaatatccacgtacaataacatatatacttcacattcaattgtgaaaaaaatatttaaaatgacaaatgattttgagctttgacctaacttgaccaaactattgtgaaaaagtatttaaaatgacaaatggttaatataataattcccatgtccttaaaacaaacacgatggaatttttagtattctcgtaacattataatctactactacttaaaaaataagaataagaggtacttccatcgttcgtcaaaaaaaccgggtgaaaaaaaaccgggcgaaaaaaaccagtttgtccgatccaaaaaaaaccggtaaagaaatttccgtttttaattataaaaaaattacccacaaaaatagtttctgtccgattccaaataaaaaaaattccgagcgacaaaagagtttccatcttcctacaaaaggaaagaatagtgcgaaaaaaaaagtttctatctgaagggaaacacgcgtgaataaatacctaattaaaaataaatatctatctctaaaaaaccttctgtcgtaaaaaaaggaaaaaaaggaccgactcccgtagagaaaaaaaaagtccgactcgtgaaaaagaggttttctcgtccgtaataaaaaaaaagaaaaaaaaacatctaactcaaactccgtaaaaagaaaaggaggaaaaaacgacccgaccaaacttaaagtcgccccttgttatccgtatatatctctttaactctaatctaatctatcaatctaatctaactttttagaaagagaagtttccatcatccgttaaaaaggaaaaaaatgcgcaagaaaaaaataatttccaaaaaaatgcgcgggaaaaatacggtttccttcgtctgaaaaaaacaaaaaaaatgctattaaaaactatcagaaagaaatacaccatttctaaaaaaatggtttcaaaaaaccacacaagaaaaaaaaactgtttataaaaaaaagccgctctgaaaaaactaaccgatgaaacactgtttataaaataacagatcaaaaaaaacaaacggactcaacacgcgaaaaaaaccgatgtttcaaaataaggttcgagaaaaccgtccgacttaatgcgagaaaaaaaccatcatttcgaaaaaaaaatagaggaaaccatccaactcaatgcgagaaaaaaaccgccgtttataaaaagaaccgctccgagaaaccgtccgactcaaagcgagataaaattgatggacgcttgggtcggataagatccatcgatatttttccatctcctacacatcatttcctacacatcatttgtttcctcatctaatccctgcactttttgtatgcaattatcattatcagactttttttaataacatattatatgaaaatagtattaaaaataaacatatttttaattgttatttaaagaagagtgcacggtgactattttgtgtagacttgatcctgagtgtaggatttgattaacctattattggttgcaagaataatattgaaagaatatttttttattatatgtatattgttatatgaataatccaattattttagttaaagcaagcattggtaaaaagattgccatcatcgagtttgggtcattacataaagatgctctaattttctaattgtgttagctacaacgatccatagaaacattatcattgatatgggtacgcttgaaaaatgtctattgtcattggattattttttttacccgttgcaacgcacgggcatttttgctagtaaatcaaatatacataaatcctatggcatatttgtttgtcttatttccctacatctgtatctatagttgcatctttccactacctggaatgacattcttccacctagtaaagatggcatattgtattatatattcataatagtttataaccttaaattaaaaatgctctatcgttatcaatattactatgttactgagtatttttatattttattttgttaatgtttctcacagtttggactttacgaactcctgtcgcattggtaaagggttaagatccaatctcatcagctagtttttttagctaatttacgtgatattttttagctaatttttatctcatagtattaatatagaactaatagaagagctagccttcaattgtaaaaatgtggactcttctatcaatattatttattttaattcacatttaaaatagttctaaatcaacttctacataaaatgttttctcactaatatttattttcaaactgaagttaagacatttgtaacttttatttctacatggattctttccctcaatattatttatttttaatccgattttaaaatatttctaaactgcactcctcccaaaactattttcgctataatatttttcttcaatccgattttcctatgtggagtctttatgttagttttattactttcaatctgaacttttggatgtttctaaattgtatttctccatggactcctaacaaaaatattatttttttgtaattgttaatcctaaattctgaattttgttaatcatatttcttacatggaatctcctttttaatttttttttattttacctaattatagatattttaaaatttaaatttaaatagaccatatttttttcttaattgtactcgtacgtgaactcttttctcaataatatttgtttttaacctgaattaaatatattcaaaattttatttctacttgaactttttatattcatactatttgtttgtaatctgaatttaaaatatttctaaattgttctcctacttaactctttctccataatatttatctttaatccaaacctttgttgtttctaaattttatttttacatgggttcttctctcaatattaactatttttaatttcacttcgaaattcatatttctttctcctaaattgtatttctatatgaagtttttttaagtaaattctatataactcttgtctctattagtatttgtttatttttaaaataaaaaattcagaataatctaaattgtatttctaccttcactcctcttctaatttttagtttttattttgaatttcatgtattttaaattgtattattttgacttggagtctaaactcttgtccgtttccacggtaatacactatgaccagagagtccgtttcttattaatgttcgacagtttcatgaatacgtgtccgtttgttttttttttcttgtcatattttcatccgtttaatatatccttgtccgtttgactgatcctaatctcatttcaatatattgtccgtttcgagtgtcttaatatacctttttttcccttttttcagtttttaactaatcctaatctaattctatttttcttttttcttattttttaattaatgtgaggatttctaggccgtgagagcgaacgtggagactcctttttctattactttattaatataatagatagatgggtggatgtgacatatcctaataccatggaagcccgactggcaataattactatagatggttataaggcccgcctagcacgacccgacccaggcacgggctaggcacggcccgaggcgatcgagccggtatggcacggttggcacttcgggtcgtgtcgtgcttgcccacgggctgcacctgcaccttaggcccaggcacggaccaccagcagtcaagccgtgccgtgccggcccgaaagcatgggtggctcatcatgccttctttgaaataagtctatttcccctctctcttctttgggctatgacatatatagctaaaataagtctattttacgtccctactctttggccgtgccatataatacatctatttttcctccctattctttgtgccgtgccttacatatggttgaaaataagtctattttgcatccctgaactttgtgtcaggccgtgccagccagcgtgacgaggtagcagcctgggcacgacacgactgtcgggccaggcaggcatgggcacgacccgagtcgggccgtgccttgcctaggccgggccttggcccgggccgtcaggccttgagacatatggtcatctataatgagtactttgtgttggtgacttgagactttctatgcggtggccgcttaccatccatctgcagcgagttccactagaagacctacttggccgttataagtttttcattgacttggctactcgagaaacgccataccttggggcaattttgagaaacatggatggccaacgtagctagcatgccttctttgtgtggcggtgctgcaaacttgcaaccatgcatagtcaacgaatgtagcttcttcaagcaagtttgggcattgtccagcattatcttcaaatatgtgctcgacctaggcgccggcgtagcagaccttaccgtttggtgggctaactctcacaaggggatggacagaacaacctgttaggcgtttgatgcgacgcttatgttggaagatatggaaggagtgaaatcttcatcaatcacagaagaatgatgaacatggtggtcgtggacgagaggccaggctacctttataacatagcgttgagtgaagagggtgccatagcctatcagaatgtgtttctccttgatacctgtaactccacacttgatgagaggtccgttgtttttcttctttagttctatcgtatgactgtattgaggaaagagcatttctaaaaagtgctttgaaatatgagaacaacaaatattttgacacaaaatttaaatatgaactttactcagctcgcgatatttcattccaaatctgtgggaacacccaatttaagcttggtgccccgaaaatccactcgtgatcgtccaggatttcgatcacgcacagattgatatacagaacagctttcgattatttacacaaatttgtttatacatgctaattatacaactgttaaagggtgaaaagatccaaactaatatatccttatttgaaatacaagaaaatccaaagtattaaactcctaaactctttaactactagaattacaactagtacactccaaagaactccacaggcaaacgctcgagtgtagactagcctagataaactcgtcgttgttgtagacctcgcttccttctgatcttcttgttagcacaatatctatatatcaaattatgcaaaggtgagtacttatgtactcagcaaaacatattataaataattaagtgtaaatagatataaatagctaaaacaatggtaaagtaaagaagtaataaaaaatcataaaccatctttatcatcaacatttaaaattttaaaactacttatacttcaggagtaggaatcaccctgatgacacaactccagaaccgggagtacggcacattcgaatgatttaattcacctctgcagagactgtccagctttacacgcacgatgcccacagctagctaggctgagaacaatagagccgttcgaaggtcccacttactactagttactgcacaatggggtcttggttcatcatagtggtcgaactcttaccaggtctagggcaaggtatctatatcgtcacactttcctgaatcccactgttgtgaaacactgccccctaactccttacgcatgttcaccccaaccgctcatagagccacccaacagtctttcatatagtgggacaatgtactaggctaagtccaatttcttggtcgtgtggattgatgcaactatgtcatttcctatggtataagggggtaattataatccggttaaaccacccaaaactttccaaactccccacaccatcatcatcattcaacaacattcataatcacaatattcacaaactcaattcataaatgcccattttaaccggattcctaagtttgtaaagatatttgaataataaaccacataaaatgatgtccaatgcatctttcaataacctcatgtaacaatgctagaaagcattaataattaccacaatattattccgaattataacatctacccatgagatgttaaaggatattatgcatcaaattaaatatgaggattaagttttctatatgatcaaattttagttatgtcttgccttgcgccttaagatttcccgcggcttcagcgtagccatctgggtccacgttagctccttggatgctgataaaacttgttgtatggtctaacgtacggatacgaaaagatagcaaataaagcctataagcaaattgctacaaagaagcgataaagccaaggaataaaaaaattggagcgaggcgagaggaaaaaggaaaggggtttaaaataaacttttaatttgaagaataaaagagaggttttggtttctaaaggttgggaattgaataaaatcaagaaaggataaatttggataggtggggtttatttggtggatttggtttctagtctgtgctagagttgggtagcacgatggctagatatttggagttggttagccgatgctaaggataggcaacatagcggctaaatatcggctcgtctagtcgatgctataatcaagtggcacaacgactagagagttgggaaggtttatccaggtttgcggggaggaatagtgttatcctacagtcgtgagtgatagtagagcggttaggatcgcacatagctcaaggactagtgtgcggcgtgttgtggaggtcgaaggagtagcgaggctccgaccactgtacgcgtcgaggcgtggggtgcgaagagcaacacttcgaccttaggattaggtgatgctgggttttacgaccaacggtttgacgtcggggtttgagaccacgcgaatgtctccatggaagccataaagtcccaaggcggttatttggtggttaagggatagttttaaaaataaaaataagtatcaaagaaatttgaattcaaaaaggggttttaaaagagattaaagaaataaaatttaaaatggtattttaaaataaagaaaagggcatttaaagaaattaaaggataatttaattttaaaagtttttaaataaaacaagaaatttaaaattaaagggatgtaaaggtatttaaataaaataatttttaaatgttaattaaaatagtttaaaattagaaagtaaataaataattaaggaaaaggcatttaaacaaagaaatttaaataaaattttaaaatagaaaatttggtatcaaaataaagggtttgaaattatatgaatttaggtcaaagaatttctggaattggatgtgtggtttgggagatatggatgctcaaagattggaattggaataaaaggaaaaagaattactttataaaagtggggcccactgtcaggtgttccttcaacctctttttctcgtcttcttcttcctctcttctccttccagccgagtacagaggagagggagggagaagggcgtcggtgctccggtggccgaggatcggcgacgtctgcggccggtggtgttcccgactgacgcgcacccgaggaaggtggaggaaggcatagggagagaggagaatggccggaacggcggcggcaagatcttggccgcggcagcaagaagagtggtggtagtggcttgatttgaggtgggagagaaggggtaaatgggtaaaatggattcgccggagtgaggtgaagctagtggtgcaaggatttgtcttgtggagctccggtgagggagatcggccgacgatggcggcagccggtcttgaggaagagagagagagcttgaggagctcggcttgtgatgaagaaaaaggggcgacctcgtcgtccttttataggctgcggagatcggtttccgatggcggttcgcggaggagaagggtgaggagaactttgtgacggcggcgtggaaaaggagacggcgccggttctgttcttccattggacgacaaaggcggcgcgcgttcgtggcggcagcgccgagattgggcggcggaggaggagagtcacggcacggcgatgacttgccgtggtcagcaagacagcggtgacggcggcagaagaccacggacggcggcgcagccgtgagcggcggcgcccacaggaaggaaaggaaagagggagggaatacagacttgtactgactgggccgaattaaggaatttaggcccaaaatgaataggagtctataggaattttgtgtggaggattttgattggaattcaaaggggatgaaaactaaaggatagatggttgtggactttttgaacttggatggaaggctttaaatagattttaaaggagataaaatttagaagagaaaagtttggggccttttgaactttataaaaagaatttaaatataaaatttttaaagcaaaaaagaagtttgaaatatttttaaaataaaatcaaagatatttattttgagatataaattttgaaaaggataaaaataaatatgctccaatcttatagaactcaataaggaccaaatataaaacttatcacaaaatagtttctctaatatttaaaaatgtaaaatttaaatagtcaaatgggaggaaagaaaatacaaataattaatcttctaactttggataaattttgggatgatagcaaaaaaaagatggaggtaaataactaggattttagcctccaaaatatgtggtatggattctcggtgaaatatttgtggctaaaggaagttggtattttgaatagaagggattggaaataagtttcttagcacaagagcaatcactcaattatttgtgatagtatagttcttgtgccgaggaggaaatcaagccataggaatcaaactggcggctcgatcaaaacaggaacttgaccctagaatattttggatcaatgtagaggaaataaaggtttttggggataggtttagataaaggtgtgatccaaaataaattccaacaaaaaaggagttatactggtttcgtcccagagataaaaatgattaatgggatataacagagagttgggtcaatcgggaaaacattggcccaagctaaatagtggactttgaaatcttgaatggataatttagatgaacgagatttcaaaggggaaatatttgtgggagtatagaactggatttagaggtatatgtggatgggaatttttataggaacggaattggtggtagattgataaacttctaaagtatgggtatattgactcgaaggtggattgaaaaggatattttatggactttggggatatttaggtggagatctaaagaaaaggtatcaacatttcatgtactctagagatattcgggtagagttcaaagggagagtattaactctgaggaaattggaaattgtactctagggaggttagaggatgacatttcatgtattctggagatagttgagtggagatcaaaaggaaagtattggttctagggaaaaataagaattggtatttcatatgtttgggtagagatcaaaggagaaatatttggtggaagataaaactggatttggtggtagtgtggtaagctctaaataaaaaaaagtattaactctagagagattgatatttcatgtgctctagagatggttgagcgggaattgtaagggtatttgtggatgttggagatgttcggtaaaggagtcaaaggaaatataatctagagccaaagttagagattaaagaaaataaataaagaggttttgtaaaatttaaaagggagcgattaactttgcaaataaagcttagatccaaagtaaaagagattaagagaaagtaaggtcgcttagcgtaagaatcaacaagagcatgacttaaaatattttgcaaaaaattttccctgaaattttgagtccgttacaaaatctcgggtggtgtttggatacatggactatggactaaattttagtccctgtcacatcagatatttgaacactaattaaaagtattaaacgtagactaataataaaactaattgcgtaaatgagagctaattcgctagacaaattttttaagcctaattaatccataattagcacatgtttaccgtagcatcacataggttaatcatggattaattaggctcaatagatttgtctcacgaattagtccaagttatggaatgggttttgtcattagtctacgtttaatacttctaattagtgtccaaacatccgatgtgacaggaactaaactttagtccgtggatccgaataccacctgaggtggaaactcaaaaggcagcagagtactagaaaaagtatactttgactccctcaactatggtccgagtatgatttataacctccaaccacaaaaccgggtatatcgactcctccaactatttaaaccggtgcaaaatatatccctgagtggttttggaagcggttttggctgacgtggagcctacgtggcagtgttgacctgttattcgtcccacgtgtcgataacgtgtcgcttatgtggcattttagagtaaaaaaatacatgggaccatgttagagacccactcaccaatgcaatttcaggagaagtaccaaatccaacacaaggaacaaccgagtctgttacaatagtggaggggttttgaggtggaaaatggtaggatacaaaggctagaaggttctagtagcttctagacaagtagaggaagagggagagtaaagatcgacaaggaaccaggcccggttccaggtcgccgccgagaagcccctcagctggttctgttcgttctctgttcgatcccctctctggttctactcctactgcttatataatgctcctgatttgcttgtttcagccttgctttgaaagtggttgacagcccatttgggttcctaacaatctcctctccttaaatttcggcttgtccccaagccgatgcaaagtatcaccagagccaccagggtcccactgtttatgtagattcttgataggaactgaacaccacatgatagcattaaggaaattgtcaaaaatgtgctcctctgcagaataaaggtcaagaatatgtgtcccagattgaagtgatcttgatagctgacaaacaattgtgaacttagcatcaacacgatcagttcttccaatcatttcagatatccatgtcttgagcttgttcctgatcagtaagtgcacaattattgttttgtgagagtgattcagtttactgcaatagaccatggaaaaacttgaagtcttgtacttgtcagcaagagcaatatatgaggatggtactgatcctgaagtccacttttctgtattaattacaaaccattgtaggtccagcatgctagtaaaaatcatcactgaatgctcaagtaagctcattgtttcttgtatgatttttcttgtatcactgttccactccatgctcgtgtcaaaactgaaagcatcatgtcgatcacacaaaaattgtaatgcaggaatttgttgattgtgaaattgggaacttaaggacatctctgtgtaaacatatacctattttccaaaaacacacctcaagatcaatagtattaccagagtatttttcacttaaactgccaatgagcaccctcaataaaaactccagtacttgtacttcaattttaggaggatggatgttccttgccagtaaccagaagatcacactgacttgcaactcaagagctccctgccaacaacgaacttcttggctcatttcagtagtggtcaagtgcacatctaatagttctgagaatgagttgaataaatgtgatacttgtgtttctgttgtcgcagagcttgatttctttggattacatccttcaggaattttaacaacaataaatatcctagtggatttcccttggatgtcatccagctcactactgatgcttggtacatgtctcactgatttgatcatcacactccaaaatatcttatgcactgcaacaacaagattccaatcaatgtgtactccatctattgtaaacacaaggccaaattttgatggatacgttagaggcattggctgagttgggggtggccatggtggcatcaagtgttccaccgtcccacaaaaatttaatcccggccatggcgaaggccttaagtctcggcctctaatcactccatctgaccaaggaggtggccatggattaacatcaagagggtttgtagtcatcatgtcatgcccaaggaactgcaccgaatacttaatgggcattggtgtgttccacttgatgttagccatcatacttcatgaaaaaaagtccatgaactgaacggaggttggaacgtccttgaatgcatctgtccaggtctggaacacaaccatagcttgaccggtgtcaccaatggcatcgaggacaaccgtcaaacacttggtgtgcgtcaacttggaatggtcagaggtgtcgctgtacgtggcaccaatggcttcctgagcagctaccaactccatagagacagtggctgtgctggcataggtcacctccgcaaccatgatgagattggactcggtgtcggggacagagcatttcatcgaacacatggtgggtgtgacctcaagagagaccttggcgacgatgtcagggtcatgaatcttgtcctcaccatccccaagctccaggatgatcgtcggagtagtcccctcgtcgtcgtagatggatctcgctgttgtgctcgggctgctgccattggggcactacgtcgaacaggtggtgggcgtcaccttggactgctcatccccaaccaaaatctgcaggtcttcagcattcttatggatttcaggcatccacgattctaccgccaccttgagagactggtattcagctctccttctctgatctgcttccacccgcctccgttcgaattcctccatccgcctcaaaatcaaatccaacttatcttcactttccatggatgcttgcttggtgaatttggtgggggttggtggctctgataccaggtttgttagagacccactcaacaatgcaatttcaggagtagaagtactaaatccaacacaaggaacaacctagtctgttacaatagtggaggggttttgaggtagaaaatgataggataaaaggctagaaggttctagtagcttctagacaggtagaggaagagggagagtaaagatcgacaaggaaccaagcccggttccaaatcgccgccgagaagcccctcagccggttctgttcgttctctgttcgatcccctctctggtgctgctcctgctgcttatataatgctcctgatttgcttgcttcggccttgctttgaaagtggttgacagcccacaggcagcccatttgggtttctaacataccggcatgtcattcacacagaaaaatagtgggaccgacatgtcattcacacagaaaaagtgggacccatcgacatgtgggccccacatgtcatctcgtgtgtcggtaggacaagcggggaggcggaaggccggcgaaggccatcagtgcgccgctggcttccgtgggtcccgtccccccggcgacagctgagttccaacgtggtggaggccggcgacgggtttgggtggcgaaagcaggatcgcggacggcgggaggcgaggatagggtctgtccccccggctgcgccgccgccgccgctgcagtcaaatgctgcttccccggccaccggcgagctagctaggtacgtaagttcatctcgattgcctttgattttgcttctacgtacaggaagtgatcacagaattccattcaatttgattatctcatcttgctgatttttttttttgttttgagctagctagctaggtcggatcgatctcgatggtggtgcccgtgttgctcctggttcgcctagacacggcggcggtcgacccaacgatggttgccaacctccgcgacgttatcgggtctctcaacgggaagactttctacctcgcctgtgacagccagatcgtcgccgctgctgccggtgacaacgaccccggcatgttccacctccgcccacagccgtccctgctcgctggcttccttgacaaggtcgcgtccgccatcaacgccctggaggagctcctccgcaaggttatcccggcgctggcagcgtacgagcaccatgtgatcttcctaaagcgcgcgcagcagaaggaggccgtcggcgccgtggatggcggagggagctgacgatggcgacggcgactcgcaggctgttcgcgggcgggggaggagctcgtcggccgtccgcgcgcgggcaggagctcgcaggccgtctgcgcacggggaaggagctagagctcgccggtggtcaggagcggtggcggtggcggtgggggcggcggtcgaggcggcagcgccggcgccggcgtctggtggccatgggcaacgacgaccacgacgctaccaggccgggggagagaaagggagataagggagagagtgggagggacgagaaagaagagaaggtgagggaggatgtcggtgggtcccacactaaaaaaatttatatatgggtcctacatttttttttatgtttttatattctaatgccacataagcgccacgtagtataaagacccggtcaaaaccgccatgtaggcgccacgtcaaccaaaaccacctccaaaaccacccagggacattgtttgcatcggttttgtggttggaggagtcgatatacccgattttgtggttggaggatataaatcatactcgggcaatagctgagggagtcaaagtatactttttcagagtactcacctcacgatcctttttttttccaaccgagtatgaactcggccctagggatggcaacggggcgggtcggagccaggttgagtaggaacggccccgtccccaacccccgactttatcccccggccccggtaatatcttcgggtgagaagcttcccccgaccctggcccctacagatccccgaccccgacaggagccttgcaagttgtagagaaagagggcaaactaggattgcggcttgtcgagggggtcggtgaggcggagatgtggcggatgtgcagcagtcgggcaacgcatgatggaggccaaggcgcagcagccagcgacgcgtgatggaggcaccgcaactggagacacgatggaagcgcaacagccggcaacgcggggccgagatgacggcacagcagccggcatgggcggcggcacggtggaagcgcagtagctggcaacgcgcggccgagacaacggcgcagccgccgacatgggcggcggtgcaaggagctgacgaggcgaagtggccgcgcagtgtcgctatcgcgtgcaacgacagcggcagcgctgatgcagtagctacacattgattcgatctggattgggtggttgattgatacgcattcctgtatggctgggtatataagatggtatacgaaaaattatcttaacaagctgggcctattgggccacattttaagtgggctatatgtggtattttcgagtccccgggtcacccgcgggtggaaacacatacccggccccgcaccccgcatattttcggggccccgccccgctgcacccacgaggccaaatatagcctcgaccctggacccgtaggggtgggtccccggcgggtacccgtaccctacggggaaattgccacccctactcggcccatgatctttccttctttcatgagttcggaaaggcagcacacttcaccagcagacctcatagtcccatatggggccatccgggcattggctgcctgtcatctcctgccgccgcccgccgtctgccgcgtcgggctcgggagcaccgcggttcatccagtcagcatccctcgtccctcccttcctccctcctgttgctccgaaattccaacgtcttttcccttttccagcgtgcccgcttgcttccaaacaaaaagcccggaggggccaaggaaagaaaaagaaagaaaggaacaggaggttaaagctgcggaaaagggcgacatttatacggagaggtggtcagaaaaaatgtctctcctgtaggagtacattgcatgtatcaccgtctgatttttcttgttctcgtggggaggcgtggatgccttccctctatcaccaaaaagaaaaaggcgttggaggaaataaaaacggcactggtaatctcagtgcggtgaaatttcgtctcggttagggaatttttcggtttgggcaaattataaaaaacgcctgaactgccatgaaacgtaatacacactacaggagtatttggaatcgaagaggaaatttagtttatcagcgttctgtattatgaacaaagggagatggattttcaatcccatcgttcttttatgtccctaagtaattattaaattctattaaatatttgaaaagatagattaatactcatattaatctatcttgttaatttttttaaaaaaacataactatttagataatatacatgaaacaagaaatgtgttctagaggaaatacttttttgggagaaaaatttctaaatgtaactattgtaacttgtatgtaacttctatataaatgaaatatttctatcataatagtcatgtggtgaagcggtaacacaatccaagcaggaagttaaacaacggtccagcatttgattccttacaggcgcatcaaatgttttttattttctcatccatgtttgcacgagtcttggaacaaatccaatggtctaagaatcgaaagttttctcccaaaaaaattgtcgacagtaatctttgtggggatgaaaatattacattgattaagatatcagctaataacaaaagggtgttgagtgatcactagtctgcacctaagatcccaatactactgcagtaaacatttttttttacatataacttaggaagagactaattctaagaccgaaagtactccagaaaatacaaaaaggacaaaaattcggagcccatgagaacaattcagttcagtgtccacatccatggatcctattgggtaggaggggactagcctaacatcccttcccgccaatttcatagtttgaatttctgcaagtcccacattccaagctctcctgatcacttcaattggaaaccaaaaccagagaggtgacgaccaccttctccccgtcatcctccgggctcttccctgctgtacggcgccgccatcgcggtgatggcaaccgtacccgcgccctactcgtggctgtcgaggctgtcgtcgaggcgtcccggctcaccgccgccgtcacatccaccttcatttgtcaggtcactcggagccgcctcctcttcgctgtcgccaccgtcgtcgtcgtcgtcagccgcggcgcagatgttcaggtcgaggctgacaccgcctctccgacggggcttgggctcgccggagagcccgcccttctccgccttcctcttgagatcaccggacagcagcagctgctccagccacacccgccggatgctcaccgcgtcgacggtggcatccaatccgttcactgtcatcatctcgccgtctgctcctcctcctcctccctcgctccagcgaccacgagtatcctgccacgtcgtcgccgccgccgccgagtccggaggcaggaggctcagtgtagtgtcggcaccacgttcgtcgacgctctcgctccggtcatgatcgcccggtgtgccaaagcttaagcgtagcccggcagagcttggattcagctcagttcgcgcctcgccgtcacggctcaccgatgatggtctgcaccaccatggcatcggtgagggaacagacgcctgatcattgtggctgcgggagtgaaccctctggcacaagattccccatttcctcctcagctccatcagctcagcctgcaacgtaaaatcgtctcgcggattagtacaaggttatagaatgagttttgtcattagtctatatttaatacttctaattagtgtttaaacatccgatgtgacagggactaaaattttttaaccccatccaaactccccctataaccatttcgcctttgtggagtcaggaaaattcccaatttcaatagaggatttcatccattggatttaccttgtgtgatgtctggggctcgtttgcgtgtggccaaccggggaaataggtgagggcaagggtggtgccatctgccttcgccctcacctgcgatgcttccttctcatagccgtcggcgcactcggcgcaaagggccggcacgccaccgtcgtctcctcccaatgcaaggtccagtgtggggatctcaccaagcttggcaatctgatcatcttctgccaccctgctacacatggccacatggaaacaagaagagatgcccattaagttccaatgcatgggggttgaatcattttaaatttcctgttctgatgaaattaaagtgaccatagcacatattctagacctttagatgaaggaaaagacaagcaaaaggaacgaacaaactacaaaagttcacctactacaacggtgtaccagaaagatcattaaccaatgttgttgtttttttctccatcggagaggttcaggatttcagctttccagcatattgtacatttgtacaaccagaaactgcctggcccagaaagaagaagaaagaatctccaaagaaaaaaatcagaatcatccacacaaagccatcctgttcctatttactacagtactctataaatactaccactactatttcaaatctaaaaatttcaataaattagaaaggtcattaaatttcagtggttcctaaatcctaagggtccctttgaatcgcagggttgaaaaaaatagagggataggaaaaacataggattttgacaggaattgaagtgtaaaatagaagattacaaaacacaagaaaaacataggaatggtcgtttgattggaacgcaggaaaaacgtaggaatcagatgagagagatagactcaaagtaaattttccaagaggttggagctcttgctaaatttcctccaaaatccacatgcaatgtgtcattccataggaatttcataagatttgaaaagtttcaatcctttgaatcaaagggccaaataggaaaatttcctataggatttgaatcctatgaaattcctatataaatcctttgatttaaaggggccctacatggctacaatgtggaatataatcctacatggctacatttctttagtactaccattgtgcaagcagcacaaagtgtgcttgtccaaacagagtacacaacaccaaacccaaagcagagaagaacagcagcagaggatgacggtcatggcacagtttacagcatggcaaaatgaaacaaagcgtacgaacgaacagggagatttgtcgagcaccttgggggtggagccggaggggcgcggcggccgagggacaggccggtgcctgcgtccgcgcccgcgcccgcggggacgaccacggcctgcagcgaccacgtcgcctccagagacggcgcccggcgccgccgccgccgctgctggcaccgcacgtacgtctggtagctcgcggccgccacgagccaggcgcgaccgcgcgacgccgcgcggagctcggacatcaggcgcgccagctcggcgaccatgtggtcctcaggggcggagtactccgcgagggcgtggtggtggtggtggtcgtcatcatcgacggcccagcgcacgtcgccgacgtagatgaccaggccggcggccttggcgtcgacgacgatggagttcgcggtccggcgtagctcggccacctgggcgtcgacgtcggcgcgggtcatgaggcggaggtggacgcgggagaggtggagcctcagcacgtgcgcgccgcgcagctcgcccgggacgtcgcccgtctccagccgcctcatgagctccgccaccgacgcctcggcgacggacaccgagtcgccgacgacgacggggttgggtcttgcccactgcttccgcaccatcacctccaagatcgccctcacgtcctcctccttgcacgacgaaccggtgtcaggacggtgcaagaactgagccggccacggcgcgccaccgccgctggcggcgtgcgcgtcgaggtcaatgtgcggctcgggggaggaggacgagtaacagacgtggtggccgccgaggctcgggagcatggcgcccccctcctcgagggtgctcttcacggcggcgctcgagaagccggcctcccgcatgacccggctcacgctggggtcgtcgaggatggagatgatgagctggtcaagctctaccttgatcgcgaggagaggctgctgctgcggttgaagcgcgtgctgcggcggctgcaggctctgcagctcgatgcagccgcgccgctggttcgcctgcgcgcgcttgagcgcggcgacgagcgcgttggacagcgtcgggtcgggcgggacgagcgacgacgccggcgagcacgcccgcccgcagtcggccatcgcattggtggcagggaggcggttgagcgcgacgttgaagcagagctccagcgccctgcaccggagcgggtgcgacgccgccgccgccgcgggcgcgcaggcggccacggccgggtgcgccctgacgcaggcgcgcctgaggaggccgtgggcgcagcacgacggctcgcccccggagcaagcgaacggaggcgggtccgacggcgacgaggacgaggacgaggacgaggagctcctcagcagcgtgaacgccacgtgcagcggcgtgagctgcgcgtgcccgcggcgtcgcgccagcgccagcgcgagcttgagcaccgcggccgcgtcggcggacagcgcctggtgcaccgtgtacccccccgcgcgcatcgccttcacccccaatgttgtcttgcaccctcgctatgctcacagtggtgtgtgcagtggcaagagtcaccagttcacctttggtaggttagctttgtgtgtgcatggtagagtagtaactagtagtagtagtattccactttttaggggtttatagaatggagtagaaagaatagacagtgctagagtggttttcacaggtcaggctttatccctctcatgttcttttcaccctgctcctcctttgtgtggattgttgctttctatacaaaggggggtcgggattagtttgtctcttttctactactactgctgctgctgttgttgcattgcatctctttgtctttctgcatgctgccctagtgccctgccaatctgaatgccatgccaaccctttctttctctgttcttttctcattcttttccgtccactttgcctttggtttttcgtcaggattcagggatctttccctttccaccctgcagaaaaggtacagataggtacctactcacacactgtgacaatatggcgccaaagatccatccattctattcattcacttgtgggcatcaccgttgagcaaatcacacactaatcaaagtgaaaggcaggaataataatgcaattgcatgcacaggcgcgcaggtagctgagtcacgagcgcgccatggcgatcgtcattcgtcaagcacagcaggcgagggaattccctgtcattccatcgtttgttccatcccatggaccggcacgccaccgtacgccgttgtttgttgcgcagtgcctgcccctgccacgccgcgtaggactagtgagcggcagcggcaagaaaggagacatttcgatgcctgggactccgtgcatgtcaagcacagtgatgagaatgtgagacgagacggatggagatgctgctgcttttgctacgaggcaggcagaacacacaaggctgctgcagtgcagcgcaggcaacgaaacagcagagagcgaagagggatggatgtgctgggttggtggctggttggctggccggcctgccggctgccggtgggcgcccccgctggcggaggaattcgaggagtggatggacggatgggtgggtcatcactggtcagagacgacgggcatgcattggttccttgacggactagccgtggtcgatctttttcctcggagttcgggggggtgccgttacttcgctatctctccgcctgtgtgaccgccctttctttgactgaccaccaaaacgaaaacgcggccccctcctagcctacccgcgtgccgttccttcccacccgactctctacactctaagtctctagtctctacacgactacacacaacaaaaggggtccgccggccgggagttcctgattaggtcgcgtatagggatggtagttttgctagtttgtctgtttacccgcagataaaaatcctaatagaggacgcgtttgcagagaggtgacatgagaggcgattcgagaggcgacgtgcttggaggcaggagaggtgatacgacgggaggaaccctactccggcgatcgccgaagcagccagtggtgagctcggtagaggagggacgaagcctagacctatgtgtgctaggaattccaagtttaggagaaagtttgggagcccaccaatggcggcatggtgcttttcgaggtgatgaggtggaaaggaggcacacccatggtggagctgggggggactcgggccccgctgggcagcgagacaaaggtatttgatctggtaagtagaggtacacagcttgcccaccttgattttttggtcgaacacttgagaggcacttccacaagtctagggtttcaaggggatttggtgtgcatccccgtcaattcgtcaccacccaggagaatcgagagagagagagagaggagtggccacgagttggagtaggaggtggagaatcacggtggaagggcacaatctccggtgatactcgacgattcgcaaaggtggttcgcgagaaacacatggcgaatcaaggtgggggatggagggggagaaatctgcagcgaccagatctccgcaacccacagtggggggatttggtggtggtggaaggagatgggaaggggataagggatttcaacggcaaaatcttcagatgcaacaacagcaacaaagtcagaatcaacaaccgccatggaagcaacaagctcgaggtatggaagacacagtgggggaaggttcaaaagggggtcagcaaggggtcactgagaaacaaactcaacagtatcgcccagtgcaaccaaggaaaaggagcaagaacagaagaaggaaagggggactccagaacagccaaaagggattcaagcaccagctccaaatccaaatcagaatccccctggaatgtttcagaatcaaaggcttgtttgtcttagatgcaaggagagaggtcatcttgtgagagattacaatgtcaatgttttttgcatcaactgtgtgaaatcaactcatagaactgaggattgcttatatgataaacaaccgagaccagtggctaagttggtaggatatggggctctaggactgggttgcatattgattcagaatgttaagactatcccacctaaggaacatatgaatcctatggcaatggttaaggtgatttatggaggtgacatatctgaaacccagttagaagaaggttttagacatcagttcaagtggaactaggaatggagggccaaaaaacaagctaatggcacattacaagtcagattcccaaacagaatgaggttggttgagttgtccaattttgaccatttcaatgtcaagggcactaaggtggaagtaaatgtgtctgaatggaacaacgaatcagctgcgattgggaaactgcatgtggtgtgggttgttgtagaaggaataccagatgagatgaaaggatatcaagccttgtttgaggtgggttctaatctaggagtggtgatggaagtggatatgccaactatcacttccaaggatgttgtcagaatgaaaattggcatgatggatttaaagcaattacctctcagattgatgctatctactcctgaggctttactgtatgaggcaatctttactctagagaaggtggtggaggttgggtggctcaaaggcaaacagatggaaggaaaagagacacaggttaaggaagatgctgaacataaggggagtttgacagagaaaaaagaggagatatgcatggactgaaggaagcagaggcaagtttagggaaggacaagggcaggggggaaagttcccagattcagtactacacccctgctaagattgagttgttagctaaggaggacaaaaagaaagcaatacagatcatgcaagacagggagatagccatggcaattcaagagaaggaagagaaggaacaacacaaggtgctcaaaagaggcttggagacaagaggagagagttctaataaggaaattatggctgttgaaagtaaggatgaatccttacctatgataaaagtgggacaaaaccagcaaatgaggtccattaaggaaggtatggaggaagatgaagaaggaaaagtacatttaggagacagtgaggaattgtttgaatctcaagaatctgaaaacaattttgcaaagtcaattggtgtggtgctgactgaagaggagggtggaagttaggaagaagaaaggagagcaagcaaaagattcaaagacagagaagaaaagaagtctttggagatggcaattgatagaaaggaggctcggaatgcatttgtcaacaaaggtcaggatcttattccctgttccatagatgattctaatgtctctttgctagatctagctaatctaataggagttagtcttggatgttcaattgaggcggtggatacaaatatgaaattgataaatgacctagaggaggctagagtgaaactcttcttgaaagaacaacaaaaggtaggaaaagatgaaccaattgaaaataaaaaaggagatgacaactttcaggatgatttatttaactttcttgatgaaacagactgtgaaagcaacaattctgaactggattgggcagaatctttattgttacattcacaatctggtgagggtaaaaagaaaaacaagaaaggaaaccttgcaattgtcaaggtcactcctagggtgaacaaaaggaaaccagggaaaaataccaaaaagaaaaaaatgaaaggaatcatatggaatatcagaggtatgaaaaaatgaaacacttgaaagacattttggatgaacataaagtggactttgtaggattgcaggaaactatgaagcacaatttttctgtcaattacactacaagaaatatgatcttctgtgacgaattcttcgtgacatcggagctattcgtcattagcacattccattttatgacgattagtatgagacggggtggcttagtgacgaaaaaaatgtgttcgttgttactgccaactaaaaatcgtgataaagtatttcaatgggtcatcgtgacgaatattaacttgtcataaggggcacaaagcaaacgtcatagatatatataatgcatttctagaaaaatatactccatctatctcataatataaggtgtcattaaagttggcacggtctccaaaactaatctttagcttataatttctcatatactataagatttgtagcaacaaaattataaccatataaaagtaatttaaatgtcaatctaatgatataatttttaacaattaaaatttatttcatattatattaagtgttggtcaaatgtttaaaactttaatcttgaaatgcatgcacgccttatattatgagatggagggagtattaaaagttaaagcaatttaatcaagtgaattaatgaggaaaataaattttttatgtaaaatttatggccggaaatatttttttaatattctacgtggtctaaattattctctgaaaatttccgtgaatttttggagctcaataacttattttaatgccccaaagttcatttaacctattaaaataaatgaaaaacaaattaaaattcatctctcttccttgggcctttttcggcccaaattttactctctccctctctcagcccgcagcctctctctccctcctcttccctcttcgggccgccggcccagcttttttgctcctccctcaccgagaagtctatttgacctccctcctctcaattcaaataacttttcaggtagtaaatgatttcaaatgaaaaaaatgtcaataacaaagttgtataacttatcaagatctacaacttttgttttggtcattttgctatataactttgtttcaataattgaatttgaatttaaaattatgacaatttcaaacaacattttcaagtactaaatgatttcaactgaaaaggtcatcaacaacaaagttgtataactcatcaatatctacaaattttgttttagtcattttgctatatgactttgtttcgataatttgaatttgaagttcaaattataacaacttcaaacaacattttcatatactaaatgattttaactgaaatagtcatcaacaacaaagttgtataactcatcaaaatctataacttttatttttgtcatttcttcatctgacaaagcgatagtaacattgttcacaaaatttatatatctctcctacaatttataaactatattggagatatgtacattttgtgaacaacgttacaaattactttgtcagatgaacaaatgaccaaaataaaaattatagatctagatggattatacaactttgttgttaatgactttttcaattgaagtcgttcactaataaaaagttctattcgaagttctcaaactttgaatttcaatttcaaattattcaaatagagtcagatagagaaatgaccaaaataaaaattttgcatctcgatgagttctacaacttcggttttggtgacttttccatttaaaatcatttattaaccccaaattttgttcgaagttgtcaaattttgaaaatttaaaatttgaatagttcaaatgaacttatttgtaaaaacgaccaatacaatagttgtagatctcgatgagttctacaatttttttatttatgatttttacatttgaaacacaaaaatcatcctaaaattaaatttaaagttctcataaattaacatattatttctattttttttgcaaaaaacaaaacaggggttgtgaactttcagcgtggcgggaagcttcgcgccccatcccccatgttagaggtggccaaacgggccggaccaaaacgggcggcccgaggcacggcggaacctgtagccggcacggcccggcacggcctgctacagtaacgggccgtgccggcacggcacgagtagccgtgccgtgcttgggccgccggccgagcccgcgggccggcacggcacggcacggctactgtagtaagtccgcatctcatccttccgcaagtccgtatctcatccctcccaactgacggcccagctcgctagccgcctccgcaagtccgttgagcacccctcctagctgatggcccagcccgccagccacctccgcaagtccgcatcgcatccctccgcgccatttcggttcctgggccaaccgtgccccgtccacggcccatttttcattcacgggcccgtactgacacggcgggccacacgcatgccgtgccggcacgggcacggcccggccatccacgggccgtgcttgggccggcggctcggcacgtgggtcgggacggcacggcccgtttcatgagccgtgcctaacgggccgtgccgaaacgggccatgccggacccgtgcccgtgccgtgccgggccgggccgcccgtttggccacctctaccccatgtcaaaaatatttcacgatgaaatgacccttttgtccagggaacttgtataatttttgatcatacaccatggttattttggtaaaatcgcatcaacgattgcttcgtatcctgcttccctcaaccctagccaccgattcaaatcagaacactccccaaccctagccgtcaccaaccatcagcagcctctaagcggcggtgcggcggcgaggcggtcaggcggcgcgtcgggcgcgcggctgcggcggctaggcggcagcggcgtccggctgtggcgtggccgcgtcgccggagcatcccaaggtgagaccctcccacgcggatcttctcgtcccaatttaacctacagtttaaccgatctgaatcagtcggcggctgcgtggtcccccaggttgaggcggaggtggcgatgacgacggcagcgatccgacgccacgaggtcggggaagagcagatcgggaggagacacggtgcccagatcccaaaaagagggcccacagatcggggggagaccgtcgccagcgtctgcccctccgccggcaccacaggaacagccgcagcagcagcgccagcggccgccgccgtcatcttcagcctccgacgccgcgccggacccgaggatcagcacgaccattggaccagcaccgccgcagccgctcgacccgtccctctcgtggctctcggcgccggcgatctcctccggccggtggtggtgcagctggcagtggccgccacatcgctgcgagtggagctgcttgctggccaccattgtcagtctcaccttgcaatcttcagataactacttgcaacaacaactgcaagcacctgattttaagtcaggtgaccatgtgagtgacctgaaactacttttattttcagtccgaatgagtagcagtagcaaactaattgattgttgtcaggcaaggcaaggcactaaggctgccagaccagaatgcattagatggcaaaagcaaggtagttagtaagctatgttttttgattctacgtagtgttgatttagtgagtggaacatctaccgtctgttacaaataccgtagttatgcccttcaaagaagtgtgaacactgagattttctttctatagcttgctggctgctgctgagcatatctaatgcacatgaagaaatcatttattgtacaaagggtcttctggtacttgagaaatgttatctagcttaaattcttgagatatattttttatccccagaatgcataattgtaatgtgctgcccatgcatcgatggtttaatctgttatatggtgttcctgttaattttgtttagatataccaactccatatgctttaggaaaattttgctttggaacattatatgaaaacacaatttataacaagccttcagaatggccgtggagcaactggatattggtggcctaccactgccatgctgtgtgttgcaacgtttaatcaccaaacaagtaatctattgatttatctctacccagtcattagtttcactctgtttcttagtaatttttgttttagatttgtgttgtaaatggcttagaaattttttttattggagttaaactttacatttgagaaaaatataatgttgtttagtgcattggtcggcatgcatgtatggtaatcaatgcacatcacgctagcaaatctgacacgccatcctttgagtttggcattgagttcctgtaaatgcactcttggatatatacatacatgggctaaagtggttcgagcacaaaatgtccattcatgaagatgcttcgttatctaacaaatgctctttttttttgtgtgtagatagtttggtggaaagatatgaaagaccactttgacaatactactgataatttgattctaccagcaccgaagcagatatctatggtctagctgcgtcgaaccttgttgctggaagcaatttagaagggactgttcagtcaattcttgaaatgggtggaggagcttgggaccgtgacactgttatgcgtgctctgggagctgcatacaacaatccagaacgggctgtggagtatttgtatactgtaagaatcatttctgcataccttccattttttccctgtcttgttgcttggacttcctgatgtgctattatgtcgttaaaacttttaaaataaataaggagtctcaaaattttaaactcatagaaagatgttaatctgtgttatttaagtttttacaatgacttgttgaaaataataacaataaacagatcaaaaaataattttaagcaacataggcacttgtcatgcatgcgtgaccacttatttcttccacttcagttgtttttcaggcgcaattttatcatgtaatcggtgactaatctattgcactgtgtatttgatacaggggcttcctgggcaagctgaggcctctgccgtagttcaagcactttctgtccctgctgcagttcaagcatttcccacgagtggctaaccagttgatttgctaatttgctgatttgctgtgtttaaattttgtgttgtattggatgtttgtcgggttgtgatggatgctaattgggctgtaacctttgtgctatatggattgttagtgtttgattgttgggcctatatgggcttagcccacttgttatttgattctaatataatgaatatgatatgatgggttgaaaatggtgtggtataatgtttgggcctatatgggcttttgcaatggatttggcctatttattatttgatattaaagcaaatgaatataatagaattgggctaaaaatagtttgcttgccattgggctaagcccattaacagggtgctcaatacatggattttaatgggccataaaatattttatgatgttttttagctagataatgacgaatatgagcgtcataaagttatgacaacagaaggatcgtcgctaaattaatgacgaaaaaataaggtttcgtcataaaacgccattagagacgcatgataggtgacgaatgaattttcgtcacgcgagcgtcacagattatgaaacgtgatgaaaaattcaatgtttgtgacgtaaatgaagcgtcatctatcataagatttcttgtagtgcaacattttgaaaactttgaccaaatccaaacatttttgttggaactgggtacctgtaacatgaagatctagggggatcctagttggtttgaatgaagataagtttagttggtttgaatgaagataagtttcagatcatagaggtgaggaaatctcaattcttcttaaaaacttccataaaaaatgtaaatgacaacaaagtctgggatctcatggttgtatatggggctgcccaaaaagaacaaaaagaaactttcctaagagaattggcacaggagttgaatggacaaaaaaatcctctgttattaggagactttaatattattagaaatgcaagtgagaaaaacaaaccaggtggctgcagtaggtggagctttatctttaatgctatactggaacaagggaatttaagggaaattgatatggggttatctagttatacctggcaaagctgtcatgaagacccaacttttgaaaaattggacatggtcctggttacaaataaattggaacaaatgtatcctcatatctcagttcaatgtttagaacatgtttattctgaccataaccccttgttggttgattctggagagaattttaagagtgaatccccttttaattttgaaaccagctggttcctgagagaagatcttgatagcacggtaagtgaagtctggacttcatatagaggtgggggttctagtatagagagatggcaaggaaagctgagggctgttaggaaaaaacttaaaggatggaataagaattgggaggggagatacaggagggaaaagaatgaaaatttaaaaacaattagggaacttgataaaaaaatagagagtgttggaatgacaaatactgacagagagatgagaagagagctggaaattaaactgaatttcaccattagagaggaaagactcaaatggttccaaggatgcaaagatcaagagactattgatggtgacaacaacacaaagtactatcatgctaaatgcaatgggagaaaaagaaaaaaacagatacacaaattgatacaagaagagggggaaattaaagggcaataaaatcttttggaatatatcacaaagttctataaaaacttgtttgggcatgctcaaggggcttctatgtccttggacatgaatgattttaccaaaatcaaagaagaagacagagaatgtttaactaaagaaatttccaaagaagaagttaaaaatgtgattgatgaaatgagaaaaaacagggctcctggcccagatgggttccctattgagttttacatacacttttgggatctgatcagtcctgatttgatggctgttatagaggatttttagagcggtactattgatgtggaaagattaaattatggaattataactttgatgccaaaaacacaagaggccctacaaatccaaaagttcagacccatctgtctgctgaatgtcagtttcaaaatcataactaaagtattgatgatgagagtaagtagagtaatagagtacctaatatcacaaaaccaaactgcttttataaaaaatagaaacattatagaagggatactgattttgcatgagactttgagttcagctcatcaaaagaaacagagtggaatactttgtaaggttgactttgaaaaggcatatgataaaataaattgggactttatttttaaaattttacaggccaaacatttccttgagaaaatttgtgactggattatgaaaataataagagggggcaaggttgctgttaaagtcaatgatcaaattgggccctattttaatacacacaaaggtttgaggcaaggagaccccatgtcaccaattcttttcaatatagctgcagaggctttgatagttttgatccagagggcagaaaaacacaacttaattcagggattgggtattgataatgagaacactattgctatcctgcaatatgcagatgatacaatctttctgatgcaaaatagttagattatgctagaaacttgaaaaaaatactttgcatttttgaacaactttcaggactgaaaatcaattttaataagagtgaggttatctgtttaggagaagcaacaaaaaacaaagaggagtacagtaagatcttcacttgcaatataggtaatttgcctataaagtatttgggcataccaattaatcaaaaaagaatcatgaacaaagactggaaacaaactgaggagaaaatggaaaaacgggtaggatgttggcaggggaatttgcaatctattggaggaagagttactttgataaactcttgtttgagcagtacacctctttacttgttgtctttctacagaattcccaaaggagtgaaagaaaaaatggattttgtaagaagaaggtttctttggcaagaagaccaaggaattagaaaataccatttggtgcaatggctagttgtttgctctccaaaagagcaagggggtctgggaattagggacttagacattatgaataaggccttgttgggtaaatggctttggaacctggagaaaactgatggtatgtggcaaaagctattgaaaagaaaaaatctatcaaaaaaaatcttggcagcctagaaaatcaaaaagggggcttcacatttctggcaagggattatggaaatcaaagatgtcttttatagttattgctagaaaaaaccaggaaatggggcaaatactctgttttgggaggataactggataggggggaagtctctgggaaaaaaaaattccttacctatatagaatcacacatacacattatataactctggcagaggttaaacaaaatggctggggtagtataatttttagaaggaacttgttgggagacaatttgagggattggaattacatcaaaaattgatgtgatcaagtaaacttgaatgattccaaagatgaaactgtttggggactaaccaaaaatgggatcttcagtgttaaatctttttatactggtatgaaaatgcaagaggctgcttctatgatgggggtgatacacaaaaagatttggcagataaaatccctctaaaaatcaggatcttcttgtggcttttgctgaaggatagtgttctaactaaagacaatctaaagaaaaggggttggaaaaaagggaacgaaacatgtcagttctgtgacaaaaaagagtcaattcaacatttattttttgattgccccatgacaagacttacttggaatgtggtggcatgtacttttggtttgcaacctgtgaaaaacattcaacatgctttgggggtatggatccagaaatgggataaaacaacaaaacacttactgttggtagggatagcaactgtgttatggtctgtctggaaaacaagaaataaagcctattttgaacagttgttgccacaagattccactgacattttatatcaagcgtgctcatggatgcatgattgggttattctgcagagacaggtgggaaatcaagaaaagctgcaatggggaatccaattgctaaagcaggtcacaaatgaggtgttcaattcacgacatgggtggcacgccagcttcagaaggattacaagcagctgatcagattagaagagaagagagaaatgtctagcttttgaacagaagagcaaagttgtttgcctgttgaagaggagtctactgttgaatgtctgttgtcgcttttataaactctagacgcagttgttttctgttttttttctgctgtaatctgtgacatttcttttaatggaaatggagggttaaggccctttgatcaaaaaaaataaaataaaaatcctaatagagtttggtttgttctccatttagaacccatgggttttttattgggttaaaacctgtacctaacgggcacacgggcatcgcccgtttacccgcgaaaccaactgacatgtgggccctcagtcaacttagtataaaaaccctaatctaaaatctttagggattctctgccaccccctagccacctctccttgtcctagttccagccgcctctcctcccagtcccagcctcctcggccttgggccctcggcagtcagcatcctccacagccgtcgcccaccaaccagttgccggctcgccgccgtgaggggacgggaggggctcgctccacctccgggaggaagctgcggccgctgtctgcaccgagctccccttcggccggtcgttgagttcctccagcttggcccccatccatctgtggcctccgtcgccacggtctcctgcctccactgcgctgagcctccgaggtattccccttctattccccttctctcctctagatctaggtatctattttttcgatctagtctcttctgattttgatctgttatttgtgatttgattactagtgatttgaagtaatgacaactccggcaagcagcagcaagcatgcaagtactccggccagtagcagccggtgtgctactcctccggcgtactatgtcatttgaagtttgttgattgtgctaaactatgtcatttgaagttgtgattgatgaacttataatgcttgtattgaacttggtacaactataccctttctttaaattgtgacattgtctttgcttgtgggaattatggttgaactgatatttggatgggtaaacgggcatgcccgcgggcgacgggcatgggaagtactccttgcccgtcatgtagtaacgggcataaattacctcacgggcacgggcaaggtagttactacccgtgccccttgtgcccgactgccatccctagtcacgtactcgcgtcgcataaaaacatttttaccccctagggtaaatcactgtacccgttattatccctttttaaaaatagaaattcgcctaatttgcctacgaatttctttccaattactgaaagacacacaaacattctcaccattctgcatacacatcatacttagctcttgtttagttcccaactttttcttcaaactttcaacttttccatcacatcaaaactttcctacaaacataaacttccaacttttttcttcaaactactaattttagtcatgatgagggaagttaggtcccgatcttccgataggtattgataaacaatcgatttgggcggagtcgtgacacaactcgatccggcttctgaacgaacacgctactgagccccgcaatcgcagcaccacgtctcctctggttatcaaccgtgccgaaacccggttgacctcgccgagaaggaaaattcttgcatgcgaatcgaagaacacaagcaagaacaagatagattgcaaccaaattgcatatgaatgattaagtactcgaatttggggttccacaaaccgatctagcggcgaaactgttcttgacagaataatctaagcaaaacccgactctaaacgatgacggctactgattaagtatgattagggacgtcctagggttgccctagggcgcacacccaattccttctaggtcagcggctagatccgtttgaagttgatgctgtcaggaggcccgaatccgaatccaaaacgtatagaactttatctcttgtcttctatggaccaaaagtgacgtggtgagatgaaagaagacttggagaaggtcttggtttggtccccaatcaacttcttcaatcatccatgcattccttacgctcggtctcttttctttcgcccaagcaagtacctctgcaaatgaaaacacacagaactcattgtgtagcaacgtttgttcaaatatataacaagtaaatctaatgtagaacatataacatatatattatatgttacctgttagatttcactttggtggggatttcattaacaaagggagggaaaccttttatattggtggatctgaggagatgtcctacatcgaacgtgataaggtctctctgcctgagatagttggacatttgaaagatcattgtgaagtgatccctggcatgcttctgcaatggttgtttcctggcaaagaacttgcagatgggttgagggttttgattgatgatgatgtctgcaattatatgtcaaactatgttggggaaggtggtgttgctgatatttatgtagagatagtaatggcagaggggtccagtgagtttggcagcaaggaggatagtgactttgaagatgaactgcaggacatatctcctgcagatgatgaatgggatgatgaggaagatgaggatttgtttgagttgaatacagggaaggaagttcttgtcatagtgtctacaccagagaagacaaagagagatctggaacaagtgcgagcatttcgtacacctgataaaggaaaagcaatggtagtagctgaacctagtgataaggggaaggcagtggtagttggtaaagagaggccgaagaaacctgtgatttctgactctgacagtgattatgttggtggagactcatgttcattagaagaagatgaagaggttcagcagatcaggaaggcttacaaagagttcaagaagaaactgaaggatggtgaggtagggaatttggatgatgttatatgtgaggggtcatctaggcagacaaatagtagagctttggttcagattgagggtgatgacagtgctagcccatatgacaacagcagtgcagatgatgattcctatgaagaggatagtgatggacagctggtcagaaagaagtccaaataccccagatttaatgtgaataggccaattgctaggcttgcactaggaatgaaatttgatggcaagaaagaattcaaagaggcagtggtgcagcttgcactggacagcaagaggttcataaggtttataaaggatgaaggttacagaacaagggccaagtgtgattgggcaacttgcccatgggcttgtttgctatcaaagaatagcaggacagaaagctggcaaatagctagtctagttgatgaacacacccgcccaccaaggaaagataaccacctagtgacatacaagaggattgctcagaagtatgagaagatgatcacagataatccaacttggagtatacagagcatgcagtccactgtttcagaggaaatgtttgcaaatgttagtgttgggcagtgcaagagagccaaagcatttgtattcaggaagatatatgagtccaccaggggtgaatactctagaatctttgactatcagttagagttgctgaggagtaatcctgggagtacagttgttgtcaagttagatactgaccagcctagtcctatattcaaaaggatatatatttgcctggctgcttccaaacagggattcctagcaggctgtaggaaagttgttgggttggatggttttttctttaaaggatcaacctatggggagctcttatgtgccataggtagggatggcaacaaccaaatgtacccaatagcatgggctatagtagagaaagaaacaaatgattcctaggattggttctgtgatctgctgttcaaggacctaggagtgggtgatggtaatggtttggtgtttattttagatcagcagaaggtacataactttagccgaaaatcgaattttgtttgctattaatttctgctccgatgattgatgtattgtctgctctgtgatgtttttcaggggatactaaatgctgtagaaaattgggcaccaaatgctgaacacaggaactgtgcaagacatatttatgccaattggaagaagaagttcagcaaaaaggagtggcaaaagaagttctggaggtgtgccaaggcaccaaatgtgatgctgttcaacttagccaaggcaaagctagcacaagaaactgtggaaggtgcaagagctataatgaacactgatccaaagcactggagtagggcatggttcaggtttggctctaactgtgactttgtagataataacatttgtgagactttcaacaaatggatagttcaagctagattcctacccattattagcatgctagaagctattagaaggaaagtaatggttagaatccaggcccaaaggacagtgatggataaatgggttggatcagtttgtcctaacattcttaagaaactgaatgcttacatcatagattctagttcttgtcatgcaatctgcaatgggatggacaagtttgaagtgaagcatcaaactcataggttcacagttgatcttgaaaaaaagacatgttcatgcagatactgggagttaagtggtctcccttgctgccatgctatagcctgcatacattttaggaccaactgtttagacagatacatcgcaccatgctactcaatctattcattcaagaagacatatagctactgcctggaaccagttgaggggatggagagctggcccaaatctgataggcctagcccacaggcacctagttatgtcaaaatgccaggaaggccttccaaaaaggataggagaagagagccacatgagaagccaaaggcaactagagtctcaacggttggaactgttatgacatgcaggttgtgtaaaaaacctggacataacaaggcttcttgtcttaagagatctcaaacacagcccaatgtgcaggttacacttcccttacaagttctgaattttttcctgcacttcctgatatttcccattgagttttttttcctgcttttgctaatatagtttgatcttgcaggctacaggttctcagcccagctccacacctgttcagccagatgctccaccaactgtaactagtgcttatttctttgtatttttatttcactattctattttgaactgcaatatagaagcttgtcccaactgtacctaatgatgttgttttgttcttatacaacagatggcaagtgcatctacatctacaagggcaagggcttcacccaggactatggaaaagacaagaacttcacccaggaatgtggcaaagacaagaactttacctaggaatgtggcaaagacaaggactgtggcacagacaaggacatcacctagggcatctgcaaagagaacatcagctacagctggaatggttgcagtggagcaatccaggaagaagttgaaagttagaaggtcctctggatagatgttgaaagttgacagttacaagttgaatgctagtgaataggataagaaagtaacctagggatacttttggacatgtttagcaggacacatagtacttatgtttagtgggtatacttttgggcctgtttagtggggatacttttggaccagattactgggatagcaataggcagaagttcaccatcttttctgcagtaagatatggcatgaaacttctgtaatctaagacatgtgacatcttttgtgtagtacctgatggcatgttatgacctgagatactcctgcaatgttaatgtttgaatttggggcagcaatgcaatgcttggtgttaatgtctgaatttgaggcagtaatgcagtaaatgcaatgcaatctattcatgtctgagatgatcacagaaaagcagtatgcagtgctactatgccataaatgtgaatttgttcttatgcaaacttatgttgcaattacaagttgcttgctaactttaaccattttccagaaattaaggctatatcaccaaatgccattactgccattccaatttattccaaatgtcactccaaactaccagacaaggtccacatacataatttcttaaggctcatattactgccaaatgcatccatacatcacatgccatcacttagcatttcacacttaggattgcactaaaatctaacatacatagcaccaaccaaaacaacaacagcaaatgctaaagcatacatcaacatgttcatacatttctgttgttgagtaatcctatcaactaaaacagtttgtagcttctatctgctcaagagctgctctcaatgattcaagctcattgctttctttgctacggctcactgccctgttcttcaaggcttcatccctgttgtcctggagatgagcctttagcccattgatttcttctcttgcagtccacacagcattcctcaaattaagcaacaattgcttccaatatggatctcactcagggtcatgccactcccaaaaatcgcaaccaccagtctacacaaataaatgtataatccaaggtcgaatgagtttgaaaccaaacaaatgagccaaaacaaaaataaatagaaatttactcacacgcgcattgtagcatgtgaaatatcttctcccggggttacccacactccacgaaatccacctagccgccttcactttgcagtcacaaaacactggcagctcgtaatcgagaggcccctccctatatggtactggcggctgcatccttcctggttcacgaccttcaacccaagaagacgacaccgagccccgggacgtacctgagctcgtcatcatgccaacgaggtcgaggtggccgtactgcacaccgtcgccgccgcgtccgtggtggagatctccggccccgtcgcctctgaccacaccactctcgccgccgtgcaagagtcgcagacgagatcgcctgtgctagggttctcacgagaaggggaaatttttctgggtcaaggctataaaccaggcgcgactcagctgactcagccaccttgccacgttggactgccatgtgcgcacgactccggtcaaaaccaccccaatgtgtgcttaagggggttaagtatccggttttaatagttcggggtacgaaatgactggttttcgacttcgggggggggagggttcggtcaaccacgatagtacagggggtaaaacatactttttccgaggaaaaataacagacttaaataatacagtcacaaactcttgctaggatgtatttaacaaggataaccatgtaatcagccacatccgtttggtttgtatgagatttgcaggaacgaaaacaatttaaaaaagaggtaatactttgtgtcatttcacaatcctagatcctatttgaggagcttaagggatcaattggcacaaaccaatgatttcaactccactcaaaagaaaatggagctggctgaagtgctctcaccaactaagatagatggaattgagtttagggagctccataactccactccagacgtaactcctaaaattaaatttatgagttagagccctaccaaacgggtcctaagattcaaaagctaggtttcttttatagcttctaattcatcttttattttacatgtataaattctcataatatgactaataatctaaactatttttctttaaataagggagacttgagattctagaaaaggctgcggctgctagaagattttcaagctccaagtcataactcttaatattaagtccttttgcctatatattccatctaatactactactgtactaaactatattaacttttagctatgtatctggacaagagtattttaaacacatagctaattatcttaggagaaattgtattacatttgatcttggcccaaaatttgcgttttgaagtatctatatagaaatgtccgatagaccaccgttaaggatttaggcatgggatatagaaatgtccgatatagatggccatatggcccgaggctcacggcccggcccaaagcacgcaattttggcccagcccaagcacggcatggcccgactagggtgtgcccgtgccggcccggcccaacagccgagccgtgcctaggctgcaccctcggcacggtgggccagcccagcacagcccgatcaaaaaaaatatagggacgcaaaatagacttaaataatcatataaggcaaatgcccaaaacaagaggtatacaaatttttcagccatttaaacacaaccacagagttgagggaccaaaaatagactttttctatgaggaagcacaataggctatcgtgccttcgggctggcccagcatggcccgagtagtattgggccgttcctgggccatgtatgccgctcgtgggctggcacggcacggtccggtgtgccgatcgggtcttgccgacccgacaagcctcggcccaggcatagtcgggcttgagccgtgcagtgctgggcggcccagatggccatctataatgtccgatatccccatccataggccggcctagcctaaatgcgccgaaagaagccgcccatctataatgcccgatatccccatccacatgccggcctagcctaaatgcgccgaaagaagagcgagggagaggaggaatgtgtatcttaattgaaaaaaaaaacttaaaaagttaattaaaatcatattaatctttcttaagtgtaaaataattaatacctaaattaatcacatgttaatggcttgcctcaatttacgtgtcttctcaatctttttctttcccctctctcaaacacaccacacgccacacattgttctgtgtaggatatcaagagaattgtacagaggtattgtcaggtataaaatgtgtagaaccaatcaccatgcctgttgccaaactttgaattattacagttcatggataatacagttgcagcaacattattcgagcagtacagaacctcaaacaatttcattttcgtgctgcctaatcgcttctagcagaaaaatgaagtcgaaacatccattataaggtacaaactacacaaactatgatcctgcaatcatctctcctatcagcgagctaacaagaaaaatcacgatttggcggcatcgttgactcatctgtgtcagggttggatacagcaaactcaaaaggttgaaaccaatcagcccgaatctaatcctgcatacatcaagctaatgacatattacacaaacagcagtagatcgtcccagagaaaggaattcacaacatggctgagttttatcccgagaagttgttgaacatggtcaacaacctcagtaaatgccaggaataaccctgcacggtactttgttgcagtacatcttccaatacttgccatacctgtcagaatgcataaaactcacgtcagaatcaggatgaaaacgagcgaatagtttccgtccgctctagagaaaaacaaatacggatacaattcaaaatggataatccagatacggataagaatatcagttagacatgcatttataccggtaatgttgtacatgttgaacttaactagcattgtttagtctatgatgaaacgttttatgtaatatgagttaattatgtatgattgtatttgtttttattaaaagtttaggtggtttcgtgttccgagaaatatttgtttccgtattcatgtccaatcatatttggtccttatttgtatttgagataatttgtatttgtttccttatccaactaaaatatgaaaacggatatggtacgagctttatccgtccatatcctctccattttaatccctactcagaatcaaccatcagggataaaacttgcacaactaggctgttcccagaaattatcctctacactaataagctttaatatttggaacatgtgcttctatcagtgtgaaacattagctaaaatgttgaatcattcaacttatatattacaggtggtaaagtttacttactttgatgagcatcggtcatcatcccttttagctcggtcgaacagcaatatggtcagaaagatcacatagaagtacggcaggaactacacgaaagcagggaccacagttattaccatcctggctaaagtcgagataaattgtaatcagggtgtgcttacatgatcaaaaagagctggaactgtccagaaaaaagcagatagaatctctggaacatagtgaaaatgacgagacaagccccacctgtccaaatggaaaatgagggtgcatgctcaaaagccattcattgcctctattgaaacaaacatggtacaaatcacttttgatgaactatgtaaagaagaaatgacgaatatattaaccatccagaagtcaagagaagactgctttttgtttctccatttgtagtctgataggaagcaacaatctaaagttccaccaaaataaagacgtcagcaatgttataaacatgctatttgttaatttggaagcagctaaatatttaatgcttcaaccttagatggagctttgccccatattgagcatttcccatttgtccgacggaattcttggcgctgacgatcacagtcatagtttatatatatgcacaatattccagcaaggagaattgagagtgctagctgcaacaaatttaacagatattcatttcaactgttagacaacaatcacaaatcatcatctggtagaactaaacagtatattcaaatacaattaacacatgaaagaaaaacattctgaaagatgaacctggggacccaaattcacagggtggttgacaaggtacattccaggagaggtgtatattgatggaacccataccaagcatccccagcaaatgtagaaaccagctggtaggaaatatatgtcagcaaaatagtgcatgcttgcaaattaaaagttgagtgctgtatcaattaatcacacgacaataccaatccaatcctggcttctcatttcaaacttacatcttcatggattattagaataaaataccttggcatcatcaaatttgtcatggtggttcaaatagttcactttatttacatcttccagggattattagaataaaatacaccttggcttcatcaaatttgtcatggtggttctaataggtcactgtaaactaagaaactaagtatctagtaatcgaacttgtacaattgattcaagtgaggtcactaagtgcgtttttttttataattgggggtggtatcaggcctaggacagctagggcctcaggccctagggcttgagatttttgtcatggcatccatatgttagctactaggtgcagtgagatacccatccaatctgatctgtagaacataaatccaaggtacatcttttgcccctccaaaaaaaaaatccatgccgataccttgatgctaatgtgtccttacgcaatgccctctcttacccaccccttgctttgatgggtccttatctagcaaatagagttggtgctgccgccggcggcttctctttttgcaaaacatgtaacttacaccgttgtgttcgatccacacaactaattaaatgcatctacgaggatcagtaactgatgaacttgttaagatacactgatgaaagcatttctgcaatgattgactgaggtttacagggtcatgtatcttcaagtttacatgcaaaacctctttgaaatagtaataactggtaatggcccagaagttttatgatgatgatgtggtaacctagaaaaatcaatattaacagtcttcacattttgtcgtatataaatttattaagttcacttgtgtattactttatttaactttattattatttggggggttggggggagggggttgtggttatcttcgcaggtcaacttagcttgtctcactatgagacagttgagttaattacaccatttaagcacttgcatacatcacggtgacatcctttgaatgtaaggagctactattcttaactttaaagaacatgaataaatttgtagaattaacctacatacagcatttcattttggagaaaatttcttttcaaacatcatattttgaaacgttaagatgcatgtaattaaaaacataggagctaccaacctctatcatgagcaatgtccatagtgcaccagtatccagattcccaccagaagaacttggtgacatagatcaacatcaatgcagtattcacaagcattgaatctgcaactcggccattcatttcatactgcattgcaaagttcaaagaaatcaactaagtttagtggataacttaatcatataatgttaacaaaagctttctatcttttacattcccattgtactattttagagcacataagtgagttctatgtacaaaagtactagatattggatagcaaccaaagcatagatgtgcctctaagttgcaagctagcatatcaccagagtattatagtattctgacctgctttatgcagtaggttacagcaagaacagcccaggacatcatcccaaaacggcagtttgtgaacactttgatatcaaagtgcttaccaatgcgaggatatagttccattccctggaatgttacatgttatatacacaagtaaagaaaaattcatgtaaaatcaaaataatgaaaatacctccccacaaaaaaagagaaaataaataataaacactatcactgtgtatcaattatcaaatataaacacaggtgaagaatgtcatcgctaatacaatactaatgatagaacaagtccatataattgatcgatctaattaacccatcacatgcaagaaatgtaactcacccagtagaaatcaattatcacattccctgaggatccagaatcagatgaagatggagcaagatgaccctaaatggagaaaaaagaagggtagcccatcaataaacgaagcatggtacatatctacataaagaataacaagcctaataaataagctcacctttatgtacagaaaaatacagaacacaaagcttccaaatacaagagcagagtatatttcccccaagtgatcgtatactattgcagggttaaaaattccaaacctgacagatgataaaatggtttaggcgaatagtggctatacaaatgataattgtacaataaaaggctttgaatcaccatggtgtagcttacaaaaagggttgtcacaaacacaatataaaaataaaataaatataatttgaaaatatgcagaacaagttattaatggtttcctgattcctccattgtgtaatgtaccaaaatcatgggtgaaatattaatatgttatagtgctcatcatatgctaaggtgcatcgaagctccttcatcaatttgagcctcgtgcaaggcgtgcattaatccaggataacaactactctactcaaatttgaaagggagaaaataatgcaacaaacaagcccatgtttaagtgctctaagttgcctgtgtgtgcttttgctagagttcactcccaagtcccaacttccatggtggtgcttttaatgagaacggatagtacccaaaagcatccgcagtggatagcatgggcaagatggtaagaaggtggggaccacacggcttaacctagcaacttcaggtaaaaaaattggtgccaagctccaagagttgatttgtgtttgggtggcattagtaactattttaacttcaaaataaactaaggtatgttggaatgtttgtgggacagtatggcaccttgagtcctcgagaattaaacaaccacaacaggcaaccaaagaagtgtgtatgaaattgtcctgtcagccatcatgataatggggaagctatagttgctacagttgagaaaatgctgtttattaagcatggtattttaaattagatcgaagtcaggagaacataatggctatacattcaaagctacttttcacaatcactagctaacaaattccggctgaccactatcatataaatagtatagataggcatagttatcgagggaacaagcaagcatggacagacagacaatttgctagatggctgaacagagaaggcaggtgaatgttgagtgtcgtaatcccaagttttgaactgtatcctcaatcagcaggtccacataaggaaagaagactatcttaccaccacaggctcaggtatgttatcaaggtcactgcatatgcttgtaagccatttgcctgaaagaaagagagcaaaaaaaaaacagagaaaacgataattattaactaaaaggacatgagcaaaaaatactatcacaatagtctttttcttttttcggggggggggggggggggggggtggtaaaataatgtgatacgtttctctccatttcggagaggctagagcaatgcatttgagaagagagtccatggcagccagcacaaggcaccttgtagacgggcacgttgcccgagggggagacggggccctcgaagcgcttcccggggaggagaagctgcagcgcggcctcgaagaggccgaagccgaagatgatcttccaggcggccatggttggcatgggccagatggccttgagcccctccagcaccccgtgctcgcggaggtgctcgtacgcccgcaccacggatccgtccgcgtgcaccatcgtgtaccacctgcaacgcccccgcacgcacgcgcacgcacgcacgcacgcaaaacccaaaaaaatctcgggggtcaggtcacagatcgggtgcggaggagagggagatgcggcgcggcgcttacaggaggatgacgaagggcgggcagagggagaggagggagagcatggaggcgtaggtgacgagcgccgagtgcaccgtcttgggcggcgtggaggctggcgccttcgccgcggcggcggaggccctaggcttggccatggcccgcgtcgatctgagcgacagtggaggaaggagatcgagtgaggcgccgagacgagaggagaggaagcggcttgacttggctctggctcctcgtctcccctgccttcctagtatgcgtgggtggggcagagacagacggggcccaacagggtggaatgcccgtgccggcgagtgtttttgtgtgtggattgtgggtgtggatcggtggttctcgcgcggatcggagggcggcgcgtgcgtcgggatttccgccccaacgcaacgcgcccaaggggaggggatggatggatggatgggaatctttgcgacgtgcatggcctgcaagtacgcgacgaagcgacggcactgttttctgtttatttgtgtccactgctatgcctggccgtatgacacggggggatatttcgtgttttccttggtactgtagggggggtgatacggtgatgggtgatgagcgctttgtcagagtatttcaatatttgccaattgtatcgggagtttttttaagctaggaaaaccgtggtctgggtctgttggaagtatatttatttcatatactgccaattgacagtcacacacatggtctcatgtaactgtcaattgtgactgtcaattgtgagcaggtcggaggataagtgattagggatttcttatttaaaggacaaatacccatcgttgtattctataattagaagaaaatttaaatgacaaattcctctttgaattcaatttgatctggaaaaaacttccatctaccaatcggcttcttttcttaaccgaatcaactaattttggtgttaatacgatccgattcatttttatccccactgagaccaatgggacccactctaatttctcccacacacattataaccattgtactctttccgtcccaaaatgtagcaacctaggatgggatgagacccattataggaatttgaatctggacatggggccataactgctattttgctatattttgggacggaggtagtaggaagatccatatttgctactactacttacggtggaccacacccttattgtcaactgttacacatcattggccttgcccttaatgtgtgagagataagagcagttagccaggtacaatagcagactattaagctaactataaacatattttaaagagataaaagaggagagagaagagcagtgagctacagatttataatcagctgcaggacgaactccaagacgcagtgtgtgtatggcaggtgggaccatgtatcaatagtgtaatatatgtttataggtaaatattgtatgaattggctattaaatcgactatagatgatttggagttagtagttggctatacttttaaacttgctctaagacaacgaaacctagcctcgttgcaaccaggaggccctgtttaggtggtgtttggatccagggactaaacttgtccctgtcacatcgaatgtttggacattaatttggagtattaaatatagactacttacaaaactaattacataaatgagatgtaattaatccataattaacacatgtttactatagcatcacataggttaatcatgggttagttaggctcaatagattcgtctcgcgaaatagtccagggttatggaataggttttattaatagtctacgtttaatacttataattagtgtctaaacatccgatgtgacagggactaaaaatttttagtcccatccaaacagccccttagttcccaaaacaaaattttcacgccgtcatagaacatgcataaagtattaaatgtaaggaaaaaacaattacacagattgcgtgtaaattgcgagatgaatcttttaagcctaattgcgccatgatctgacaatgtggtgctacagtaaacatttgctaatgacggattaattaggcttaataaatttgtcttgcagttccctagtgaaatttgttttgttattagactacatttaatacttcaaatgtgtatctgtatatccgatgtgataaccaaacccaaaaattttccccaactaaacaaggcctatgaacaatagaacagaaggctgctgccttgtctcctcttcctcctgattcttcccttcctcaaacactctatttctctagccccaaactcccaatcccctgctactttccagtccaattgcaggtgttctccgcggcaacaatttggagatcctgctcacctcccaatccggtgcacgccaaatggaagtacgacgaggtctaacagcacaacaaactcaacgcagtacagaagagagaagctccataccctggtacaaacctccagtaataacccaggaaagaagagggagaataacatgcacaatggactggacgtctccaggcctgcctcttgcttataatggttaatggtgtggttttataaaactttatataatactataatacccgaagttatgtgtcacgtgctaaaatctccgaggttttgtgcaacttaaaccataatagatgaagctttctaaaaattactctattaatttcgaatttcaaaattaagttaatacatactaaattgagatgtgtacatattcatatttatcaattcttgatataaattatttaatcttcttggataatgaagagaaacttagacaagggcaaaagtatcaatgcaaatgatagtcctacttagaaatcatattataattgccaaagttcaaaaaaaaaacctatttagagtgggattagaacaacaattataatattttaagtgatatttgttataatgtcatctcccagagtgggtatccaatgttctggaataaagataaagtatgtccccttttatcccaaaatataacgatttgtagtatttaaaatttattccacaatatggcaacctctccatatactcacttatctcaactatcacaaccatctcatatttaatttctccatctacttccatatcttaaccaagcacaactatctcctatttaatttcacctaatagaatatacatgaatgcaaacagatgtgcaagaaattacagttatataaagggatatcacctgacaaaatgggacaatacacggatataactgctatctctgaccgtgatgggctcccgtgctcatagatccaataccattcacaggtgaataacataggcatacttacatccaggcactgatcaatggacatgaaaacaaaacacgtatttaaatacgaggtcaaagtgacacttggaaatattgatatgaaaaatccattttcaatcatggctagcatgtgaatcgatttgctgtccatcatgaagatgcccaccatgctccatccatgtagctactgcttagatttttgaggtttgaaaatgttgtcctcgtagtatttcagttcagcgatgctttctttgatatcattcattgccctatgttttttccctttttgaggagttcgcttcctttctgcgaagaacgtggcaaaggatgtcaagtttcatcgatatatttgcacgatttatttcacatcacaggagatcttgaatttagaatttaatgatgcgtggaagatgctggcacagccagcaacatgacctttgatagaacaatgtcactacattgaacctcagtagaactaaagctctaatttgagttggcgcaaaatctaaacatctcctccctctgttgattaacataggcgcacgttgacttcacacaaggatatagatgataaaaacttgaaatgcaccacaaatgtaattattttgggattatgaagatgtgggtggtaatacataaatgcatatgagagagagagagagagagagagagagagagagagagagtaaaaaagatgcacagtaatgaaacctcattaaaaagcttcatacaagacaatttttaacaagaccattcaatttcaaactttaggacttacatttgtcaatggagggagcataaaacaacaactatcatgatgttaaaatttaacagggatatgtaccaggctaacaaatgctgtcatttggctagtttttctactgaaactggagatttttctttttgtttggaaacaaactggagtatttattcatggcaattgtttagttacaccctggctctgtttcataatagttgtgtactttcacgacttcagttaagaaatctaaagtttagcaattgcaatgatcctactcttagcttgatttttagtgttgagagagtgatttactagttgtaacgtgtcatcaaataagggtatgtaaggatcaagatcatagtaggcttggaagaatattggcattgaattgttttatttgtcttctcaaacatcataaataaataaaaaaagtcttctccatagtatcataatacgagttgcaattcttcatggcattgcaacacttgaagcaaaaatactgttaagaaataggaaaactgtatccctattggcagacaaataagtgcagttaccaaataaattaatggaatatcccagacttgataggaattaggaaaacagtcaaacactaatactcatcaggcagaacttaaaaaatttagttcacctttggggtaccatctgatgcacaaagccattatactgctcacatcaacaataacgtgagagaagatggctgcaagctgcggcatataattctgtaaagaaaagtataaaatagaaatatcatcctccaagggattataagtcatatttaaaatggaaaaaccttgcaaaaatgatcaatatgttatgcctagtatcgcaagaaatattgagcatatatttgtgcaataacatgcgttcagagtgaagaattcataatgggcagatgtgttggtccatgaccagaaaatgtccccagaaaaaaatgctcatctcactgtgtatcatttctcactgtgttgcacaaagtaaaagaaataaagcatcaatatcccagctagtatatgacacctctaaagggcaattcttactaaccttcaaaaatagtaaatccacataaacagaattcccagctattaatggaggagatgaaccaacatgcttcttaacaaaatctaacacctgcaaatggaccaacagaagcttctattacaaaaacattagtgtaactatgtaatctttcaagatacacattaatttatatcttgtcatgggcaagccacagccatggaggatgcaaggggctcagacaggggacgctaccagcagcacctaattaggatttaagatttgtgcagttatctctagctcgttacatagtcatcattccatcagggagtcaagtagactaacccctgtagttctgggcgtaaactagacctataggaatacaatatattactagagccacttattctgacaaatatcatattattcagaatgaggataagtaaatgaaactatactgcaaatttaaatcatgatgactatttgatataaatacatttaccaaaatgttatacgaaatgtgagtttcaagtagcaaataggcaactaaagaagtcctaaactacaccaaaggtttaaacattgagacatattggttgagtgatgtaacttcataagcatgtctaccaatatgttgaaaaatacgagggtaaacatatgcatacttgtgtctctgcgtcatgctctgaaatcgtactctgtagtactctctgtgtcaatcctacataagtttcacatgtcataagattaatatttagaaaattaacacacaacaagaaaatggtactttgaatataacaaacaacctctctcttaatgaaatgatacgcagatctcctgtgtattcaggaaaaaaaatacaaacaatttaccactagctgcatgatgagttttgcaccattcatccatgttatctaacagatctttcttctgatttataaccaaatcagggccctgcataaccaaaaacagtcatgtcataatattcaattggcacctgaacaaagaactaaggaacagactagattaacaaatagctgtgggtttcataacatatgatatttgtagcattcaacggtcactcatctagtattaatcaaaatagcggatgtgatgaaaagaacaccattgtgttgtacgaattacagtatccagaatatatgtagaacaaactacgaaggtatttaaattcaactgccacctctatttgttttgtaagtttaccgtccgttatgatgcaagctatctccaatatccgatcctttgcaacatccaaacctacattatccaataagtgagttcccattagtcctacctaattattttaggtatgatgtaaaaaagacaaaacatgatctgaaatatatttcttttaactatacataaaacaattaattgagagaaagagatgcaaagagtgattaaattcccaactgcagcaaccatcatcagatcagaaatcaaacaacatttagctatcactaccaaagttccagtattatccttcttattggatgttgaagaccaccaactaaccaattatataggatataggagatctggagataaccatatttggttcgaaatttgttctgttgttcattagaatccaagattatagcccgactaatgaaacccacacatcagaaatttgatgtatgtctcccttttcacaatgaacaagtgaacaatggcttgacaccatgttaatagaccactgatattctgtgaaaaatgctatatcatccagaccgaacaagtgaacaatggcttgataccatgttaatagaccactgatattctgttaaaaaattactgctatataatccagaccactgagcaatcttgaatgatttgtcatttacatatcaactgtgtgcatatatacttattaaaggtccattaataacgaaatgataccatatctctccttagagaaacattataataaaaataataaaacattctattctgaagtatgataaaaacacaaactgttaggacgaaaaaagtaatgaaaatgcaacataaaaatgaattcttcccataatgttgcaagataaacaagtgataactcaaaaaacacaccagtcatttccaagtctatccacaccaaaggcatctggtaatcaccagatgatgatacaagagatccttcatcgtaatttagtaccaacgtgtcactcagcgcattttcacctgcatggtggatgcaacatctaaccccattaatgaatatatattgattgagaataagaaattcaatggaaagaatcgtataagacatgaacataagtgtcagttgtagttacaggtaagaaaaagggtcttccttacatgtatcataatgctttcatttgcttaatgaaaattcctttatctaataagatacataccatgacgctggtagacatgcttatggaacaagtccattgtaaataaattttcaacataacagaaaaggaatttattcaagatcaaacatcaaatattctaaaacatatagggcatgtggttataatgtcaaaagagcaaaacattttgcaaggctaactgaattcagtacaaaagtaggcaccgtggtttgctggatttttttttaattcaagttaaattgtagtccagtgaacccccaggcatactatacaaaatgtaactgcttaaactaagaatactggagtaaacatgagttacagtagcaattctctatgcaggaataaagcagcggaaatctatatcagcgtaatgccataatccattacttagtttactttagaagaacaggggtaacaatcaggttttaccggcatcagcctctttgatgctggaagatgtttggatcagtgcttcttctgtatcatctgctccaccaccttcaccatctagatgaagaaccaagaacttgttcgcaagctcactcatctcccaaatttctctttcagctaatttaatccacgcaccaaacttctgaaaagaaaacgagcacagattgaataccatcaaacacatgtaggtcctcggaggttcaaacaaattagctgcctagtagtggatacatgcaagaaaagtaaagctagcatatcactacctctttcaacatcatgtttaggaagttgtcaccatatagtaatatattagttaatctttgtacacttcgcccccaaaagcaagaacgctttacctttcccacccctactctgaggtttacaagctgcacgaggagattaaggccccgcccttgttgaaattgctcgataacagactcctcctccctcggcgaaggtgcgcaccggcggtcggcggtcggcggccggcagcggcagacgcggaatcgcacgcacgggcacggagcaaccgaggctgaggttggtttagggaggaagcgctgccgggggacgccggagagctggtggccctttccccaccgtgaccaacctcggtggacttaagttgggccaacatcggtggcttcggcccaacagagcggagccgaactgcaatgaaaaaaaaggggaaaacatccaattttggatggtggtttcgttccacacgacaggttgacatggtcttcatctgttgtggcccctatgtggtgcttatatgtcattacagttataaacaaaatataaataattcatgagtcccatctaccagtgacatagctaatgccagtccaatcctcctaagcaatcgttggtggtggcgtctttgtttgctgaagctcctttgctactgtcgctgatgtgccaccggccttctctcacaacctgccatcatgcttcaagctccttgcgcatgcaacaagggtgatgagggagacaagggacagcttagagactgtgtggcgagtgtctcctagagctacattctaacaactggtgcaaattgttgtcatggtcattgtagcacgcagtcgtgaaaccgtgaccgccgatgacgcactcatgtacctagtggtcgcgggcctatggatctgccacgtaggcttagctgcctcgaacatcgcaatccatgtctgcgataaggtcccccgagtacatgccgtggtgtttgaggtctctgacgttgccattctcgttgtagcttcaatcatcccgttactttgttgctacacctcgtcctactcaccatctccgacatcaatgatgacatcgagccagagaagatactacaaaacaaaaataaatgcctttgggtccaatttcgtgtgtgtccctgcggattaccgtatccatatcaatcaattctaaattgcacaagtttgtactcagtaggatcgaatataaggaccaacctaccagagagggtgaatgatacgaacagtaaaaaccaaatccttttgtagaattaaaaaaccctcaaatctggtggagtggagatgcgaccggtcaaactgttggatcaatgtttgttagactattgatgtgccgcactaccttgccgctagtcaaaccgccttggagcctccggccagactactcgtctgttgtctactcgctaccgccaattcgaccacttgcttgctgctggttagattgcccgctggtctggctgtcgagatttagaaaaactaggtgatacctcgcgctttgctgtggaattgatggatggatatatgtgaaatattgtacaaatgatgaatgttgaaatgttgtgaaaatgatgtgggggacaagatgatgcgtcatgcttatataaaatttaacatgtaaattgctaatgggtgatgaggtgacatacttgcatattgagctttagcttttaataattgctagtgggtacaaaatatatagaaagtatagatatgcctcgatgaaactcttgaaagtggatcagctttattatatcaagatgtgtttataaagtgcatccaaatcactcccgtctcaactcacgaactagaattgaaagctcaaagcagactctaagttttttctcccaaaaaatcgatgtatttttagcctcaacccctcttctatttatactcaaaacatggttgttgcggctagccacaaatcctaatagaactagaaatcctaattacataggaaaccactcaaactagggaaacaacatccttttacaattccaaacttcaacatttctaaacttggactccaatccaaatttagctctgcttttcatacagacgcttgtatgtgatatggaaacctatgttactactgtttttttgttcgagtccaatcaaatatatattattatgattatctctgtctcaagatacatgccttagacatgaaacaggcaaatgttttttatttaattgtgatgagatgtcgatcacttgtactttaattatttagatgaaattgtggtctgggtagtgctaattagattaaagggggttttgcatcgcttatgatacatgacctagtggatgcatggatttgtgtggccaaattgggtatgatgttggtttcatagttggaaaataatatagtactataaaagatacccgtgcattgcaacgggataaactaattttatgataaacattgcatgattaaggttcagttttcatgatatgactattttccaaattatcaggtcaatgtaaagaaccaaaccctaaaacaaataaataatttaatagtccgaattacctattagatcttaaccaattccccccggagtgatctaggatttgggtggaaatcagatcagtgtaagctagtacaaaacacatgctactccgtattggtaaactgtaagggcatgttcaatggtagagacgagtatggtctcttaaacaatataagattatctagagaccgtgtctttataatagttaacacgacaaagactctaatcattaactcaaaaaatattccttttgttaatattcttttcattttttttaccctcatgcaaccatatttctatatatattatagtgattaaaagtcgttgttatacataacaacaatgttttgtctctcctctttctctttcttccactattgacaaccattatacataccctaacaatcatattcagagattaaattttctctctggaacaatcataataacaaaagaaatagtagaatgcataaaatccgtttccttaaaatacaaaatctgaaccgagaatatgcgggatcccctccgaaagagctaaaaggcgatcagccgcgtgcccccccccccccggcgcggcgaggcacatggcgtgcgcggagggggccgcgcggcagcgtgtggccgcgtgcgtaggttggggcccgctggttttttccgttggtttcttttcccttttttgcggttttccttttggttttttttctgtttttttccttttcggttttttaaagcatatacgtatacgtatatatacaaactttgtatacgatatatataaagtttgtatacacgtacgtacgtatataaagtttgtatacttatatacgaatatacgcgatgttttttttattttttaatacgtacgtatacaaagtttgtatacttgtatataaagtttgtacacgtcgtatacaaagtttgcatctgtgtatatttttttatacatcaaaaaaatatatatagtagtaatactagtagtaaaattggggagaaccatcattgccagaatgccggttgtgagaacgacctaaaattggggagaaattggataggttaattcaacgaggaaatactgaagtacagtagcgtggatgaggagggaaggttagagagtagtctcttctgcttctacttgcgtttatatttgagtttgacgaacctgactcatcacgtttataaaatcgtgcggttatcacgtgcgataactttcttattttttaaaaccacagtatatctcaccgtaactgtggggttactgtgataaccgctaaaccgtgaggtgatggtaacaccacaaaaacggtttggtgaacctgactgactcctcgcccaaggcttggcttctggacgaacatggactcccggcctgctgctcgagacgcggacggacctggactcccagatgcatgcacaggacgatttaggacggagggagtatcgtactatactactagtattaacctaaaaaatgataaaagcacaatagtatgtaaactacgatctctttggtctttgtctgaccagcaacacctaacaagtatcaagctggtcaaatttggttggcccgacccatgaaatcttgttcttgtttgaacggccggtaagaaacagttattgagcactaattaaccaatcaccatctcatttcatcataacatcattagatggcgtactgtacatacatgcacggagcaataggagtagataacatcatttgtttggagccgacgatgatccgcaacacgcaaagacgacgacggcggaggacgacgtcgacatggctgcagcagctgccggcggacacggcaaccactcccactcccacctactaccgccactgctacgtttcccccacgtcttctcatggcgaccgttcttgctgtcactgtcactgtaactgccatggccgccaccaacctcagcgtccacgagctcgtacctcaccgcccccttgctcggctccgacgcgttgtacacgtacccgctcgccgcgccggccgcggccgcggcaatgctgccggcgccgccgagcctctccgacatctccggcggcatcgatgtgttgttcgcctcggcgtccagcagcagcgtgtcgccgtccacgccccagagcgagactttgccgccgccgcctccggccagcacgaggaggcgctcgctggcgcctccgccgccgctcgttgtcacgccgcaggccgcccatgactcgacggaggcggtgttgttgccctcgggcagctggagctggcgcgccggcccccactgcctcgccgccgggtcgaaccagctcgcccaccccgttcgcctctccaccacgtacacccgccgctccgaggcggcggatgacacccacctcgacgccaacggcgccggcatcggcgggcacgtcgcccaccctgcaccctcgtcaagaacctccaccacgcccgcggccgccgtcgccccgcacccgccgccgagcacgaccacgtggggacccaccgccgccacgaccgggtcgacacgccacacccgcggaggcggcagctcgcgccacgcggcgccgaccgcgtcctcggagacggccatggacgcgagggagagcgcgtagacgcggtcgccgccggcgcaggcgcaccgccggacggggagcgccccggcgacgcgccacccatcggaggcccacgccccggcgcgcgggtcgtacacgtgcgtggagcggccgacgccagcggcggcgccgtggacgtgcgccacgaggcaggggaggtgccgccggcgccggcggtggcgctggtgcgcctcgcgcgcggcgcggcgccactcccgcgacacgagcgcgggcgacgcggtgagctcgccgtgcggcacgcgcagcagcacgcactccagcaggtcgccgtgcagcacggagtcggcagcgtccgccgcctccatgggaatgggatcctagctgcactgctgctgcttgaggatcagtggatgaattaatcgatcaccttcttttgaaatgcaaatgcattatttaactactcctatattaacgttaatctgttggtcgaatcgttgatggcgccaagtacctaccaacccgactacgacctaacgaatgatgagtagtcttcccggggttggtgaaatatgtaagacgtgttgctgacgagtgtgtgatgccattccacaccagagttacttggacgaaattgaaacaggacatgcacgggagaaattgaagcatgactaacctttcctgacggcttcagcaattcatcacctaaaatatatcagatgacaacacaacaacacacaatatttgttaacgagattcagtcgaaacctaatccccaaagctctgattatgaacgctccgttccaaccaacataacacctagccgctatgaatccatagccacaccatcatcatcttcttgcgtatctacgctacattatagtcgttatagttacattgtggtgcccaccttacctataacagagtctgactctaactctatcatatacatattccaacttctagtgggactagtatatttgacacctattctaacaaacttcacattgacaaatatacgtcacctagaagtaatagaatcaccatattgattcacatgtcctccagacataggttggttctttttgtagtttcactgtgagccgattgacgagactgcactagactcgccgtcgttaagagactacgctatccttgtaacttcttacttttaactttatctgcaacagtgcttcaccttctctcttactatcataatcgttttgccaaacgaaattggactgctccttagctgccacatcatagattcctcgaagattatattcacctccatctttcgtcttaaatttgattttatctattctattctacggccagataacccatgtcatgactaaagaggcaaatcaaagtcaccaaactattgaagagaatccttttcttccatgttgttttatgaactgagctaaacaaatccaacatctatccttttcgcatccttatattggacccatgacactttgagaaaaatcaccgttgtttctcttcagttatggtctaactccatatatctcaacacgacgtcgagtctcagatatattatgttttcgctagataattccatatacaacctgactagtctatcgccgtcagtctactcgtcatatgtctcaatacgatcgactttgccccttagtctaaacagctgtacttgatcccatcgttcgatccatccttgtctgatcgaaaaccacgtacaactcacatgtcgcagcctgctatgtgaagctttctggaggtgtcaaatctccatgcactagttgctattctcaacttaggtctggtttagtttcccaaaattttttaccaaaaatatcacatcgatctttgacacatgcatggaacattaaatatagattaaaaaaactaattgcatagctaggggaaaatcgcgagacgaatcttttgagcctaattagtccatgattagtcgtcataagtgctacagtaaccaacatatgctaatgacagattaattaggctcaaaagattcatcgcgcggtttccaggcgagttatgaaattagttttttcattcgtgtctgaaaaccccttccaacattcggtgaaacatccgatgtgacactcaaaaattttcttttcgcaaactaaacaaacccttactctattagtttgcaaattggagactttggatttttggaatgtggactaagttatgtactatatgtacttctattttgatgtggtcatgactcgtcagattatgcgtatgtgtgtcatgtttggacatgtacgtgctgaatggagaatggacattgtggtcttgtcatcttgtgaaatgtcagaaattcaaatacgatggccgtgtttagtttcaaattattttcttcaaactatatacttttccgtcatatcgaactttcctacacacacaaacttttaacttttccatcacatcgttctaatttctttaaacctccaattttgacgtggaaataaacacagccgttacttgttggcttgctattgcattgcattatttaatgcctatatgatatgtaagagtatgattataatccattcttgttgtttacttattgaaaattgattgctctattgttgaagtgtttatttgctgctagctattgttaagaattattgctctatttctttatttgttgttttagctcattttgttaatcaagccgagcatattcttcgccaagctttcacgagccaatccctaaacatagccaacaaaaaaaaaatatttgttgcggcagggcgagagagggtgaggggaagtgtgagattgaatttttcattttcatgggtttcctaaattgattttaacactgaaggcatcgaaccaaagtttccattgtccaaacttaccgaactaacactagaacttgcccttatggttttgtggtccacaatgcatctttcatagcaaaaacgataaaaacaaatctattgaagtgatatatattggctaaatgggaagcacatacatacactttgagaacttgcgaagtgatgttgtctatataccgtcgctaaaataaaataaataaaaaaaaaagcaaatgcaccagccgggaatcgaacccgggtctgtaccgtggcagggtactattctaccactagaccactggtgcttattgcatgcgtagtctgtttgattttagatgacactgcaatcgacaaaattcttacattgttcatgctaccaccaccaggaatcagatcctctaaagtcgaccaaaatgacttgtgtctgcagtcacgtgcatctggccactcagtccctatcgaacggtggagccagaaatatctgctgtcccactcggcttgctgggccggcccaactcagcaggacgcacgtaagagctttggctgctgtaattttcctggcgcgaagcttcactactttggcgccggtttgacaacaagagcaagtttaaaaaaaagggaggaaacaaaaaagaaaaaagttcaaaggtgtatgacaagaaaaatggaaattgttcaaaggtatatgactgttggaattaatacacgggctaaggcccattcgaagattaattctttggaaaatcacaaaagcccacctcataagatggcatgcatgtggagtttagtaccaccttgcttattctaggaaagggggacctccttaaaagggaggatgccctcctagccatttgaagcatgtgtggtggagagaagaggggaaacacacgcgctcgctcacctcgccgcagtctccttttgcagttttgttttgctgcaggaaattcggatttgttttgttttggaaacattccgaaaaatccggtgcgtgaaaacggcgtgtagtccggataagttatgcgcgacttatccggttcggttacgtggagtggagatcgtgcggacgccctgatcaagcgacctatctctatataaaccgagctgccgccttcacgcaacatacgcgaaatcaatctagggtttgcctcctactctgtgctgcgccgtcgctcgtagactactccatctcgctcaccgacgtgcaccggcgatcgggagagcaggtctccggaacctctgccttcgacgtcctgcaccgggagaaggcggcaataaggtttttgggaagcgcttcgcgcgactgctgcctgttcgtccgcgacggctcaccttcctctccgctcgcgtgctgcgcgccttcgtcgacgcctgcaaccgcgagtagttcctaccgagcaaccggtctttccgccacctcggtacgtgttcgacatgctgcatatatttgatctgttcatgctttactgcttagtttatatgtgtagatctaatgatgcgttcatgctagtttacatctgcaatgtcatgattcatttatggaataaattaaatcattatgtgcttataatttcaacaatccaaaaaccttattataggcgctgtgattttactatggctggttttaccgatgcactgaggctggataaatttaccggtgtgcactttaagagatggcagatcagggtcactctgtggctaacagctatgaaatgcttctgggtgagtactggcaagcctataggcgttcttaatgctgatcagcagaaagaaatcgatgaggccactactctctttgtgggatgcattcttagtgtgcttagcgatcgtctggtcgaggtgtatatgtgtagacccccgattttggaaatcggaaatcttttgtgtttatccataccaatccctggatcagtagttggtacacacatacatagttggatcacaacatatcaagaatgaattcaggctaaaagagttaaatacttacattagggccaggtaggccaacaactatcagagaacaacagcggaagacaaaataatataagggcccggttaacatgtcacaggcagttgactggggaacgagacctagaacaagaccgcactccgatcatcttgtcaggtacacaagcgtactaacaagggcttctcttcaacaccctcctaaaagatatataaatagcaagagtgagtaccaaccgtactcagcaagccaccatagcaacaatgcatatgatagagggtatttcaaggaagggctccaggttcttttgcgtaaagcaaactttgcaaatcttttcacaagcctaagacctagcatagactaatcaagttttactaccaatgtttacattatacaacgacggttctgtccaccatccattgtgatcccaaggatagcttcccgccattgagtcgtcatgattttctgaggacgtccgccttcctttatctcaggaagtggctccatcagcataaagctcatcatgcaataacccatcccacacaagttaagaatttagagtctagccaagtgtaatacacgtctcggtgctcaataaccacgagcacggctattcgaatagatttggtttactcacactgcagtggatgtacactttatccgcactccgcgactgcccaacacataagcctcgtcccaacacatgagacgcgtcacggcaaagctttttgataacctcgcattggcagtacccgctccatgaactttacatcctcatacactctaggcgtacacggtttctagcagtgagaggagttctggcgcacccgggaagggaagactcatacatgcattaagttataattatgtttagattctcacatggcagtcctacgatggcgacaccactgtagatacccgccccgcggtcctaccaatggctgccccaccgtagagcccctgcctcacacatcaagaaaccactatgcatggatactgcctccgctcagctatctactccgctaggtctatatccatacgagaagtgcggttgtacgggggtcgtttcatgcttaacttcatggctcggtccttaattgaccggggacggcactagccttttccggacaccacccaaatcctccgtccgccccagtcgaaaacagttgtttaattttatttctcctttcacaaatcatgtcatcaacatcatggcaatgtggcgctcatgtctccacatgccgcatctcaattaccttcccaaagataattgcctaagcatatagcatttgataaatatgagtatgcatgattctagaatagcatttctaagcaattgtcataattgactagggactcatacgtaaacatggttacgaaggcataaggggtaaacaataatcaaggcatggcataatcacaagtaggatgttcatcattgcatgcaattttatttgtaaacaaaataatttcgcaattgggatcaacatgttcaaagaatagtgatgacttgcctgctcagaatagtccttattcttgatataatcttgatcaaccttcacctcctagaagttgcagacgttgcctcacgactaatcggtacacagattctataatacgtgagaaaaaccaatattcagacaacaaccaaatatgcacaaatagaatgtaattgttggggtcgaacctagggttgctcatattactcgcgcttgctaatggattccaatcatgctagaggctaaggcttcttaatctttctatcgtcatcatggtctatttaggagttaaccaatagtgtataaatgagatatacatctagctaatgtgtggtttagtctagctaatgactatggaaggattatggctacacatgcatttatctaaataaagtggtcatatactagaggttctcttatcggatggatttagtatcaatcaaattattacagtgaatcatttgtatcattattttattgatggaggttttactttaattatgaacataattttcttgtcacaacaaattatgaaaggataataattatccatgctttgaatgttagagttgtttaggttaatcatattatggttatagattatcccttaatgaacaatcctaatttacagttgaactataattataattatatgaggtcaagatttataactagtatttatctaatatacatgtttgtcatatactccctctaatttaatatatgcaacacgcaaattataatactataccgtacaactataatgggatgtatagtatatgtgtaagcaacaatattttattattggatcatatatttgagtagttgctttttactgtaagctatacaatacatgttgattttaagatggctctgtttggttaactaatggatgtcaaccgaactatatatatatatatatatatatatatatatatatatatatatatatatatatatatatatatatatatacttttaagtggtccaaatacaactagctctgttattattctcctaaacaagttaaagattcatctatgtgtgtttatattttagttacaaaatatgaggctaaactttatgtaaataatttataagtcatggatataattatatatgggcatctattagttaatggcactaatatttcctatgctcgtattgatttgaaacattaattataattaatttatgtggttgctacagtgacaaaacatattaaagaccaatattattacatctactctattgtacaatatcaatcctattcattagctcatttttaagttgactattatgcatcatcttgatactaattattaaaaattataaatatattttattaaatagtgaattatataatattggaaagcttatgaatttatatgaatttaggttcaagtttcacttaaatccgagttaaaatgaataaattacgctagtgtaaaaattcaaatttgaattaatccgagaaaatgcgaaaagctgctgttcataaacgatttatttttaacccaagacatatccacagccttgtaccaactgacaagtgggaccccgggtttattcctttttcctaccgaattatttttcaatgcaaaattccacaggtggaccccgctgctctctctttctcgttctttcttttcccgtcgtcttcttcctcgcgccggccatcgagcggagcagaggcgcggcgcgtgcgccccagcccgggcgagggcatcccagcggcgaccagaggaggctcggaggaactccagtgaccacccgaaggcggccacggcgcatggcgccgtgtggactggcggctaaactcggccacgccatggctgagctcgggcaacatggggctagggcgatagcgataatttctgaccgaattgatgggtgtgggagcatctacggggtgtgagggttccattttgctagctagatggagagaaggggctccgggatggcttgtccacagcgagctcaccggcggcaaaacggtggccggaccggcatggctacggttgctaattggcaaaattaaagggggctctagtttcacggaactaggagaggacataggagcgaggacttaccgagggatggaggaacgacgaagctcggcggcgttggtggacaggcatgcacacaaggtgtttgagaaaatgcatacaagagagaagaagaggcagagaggggtggacgagctcgtgggggctcttggggccttgtgatgggagccaacatggtgtgtggggaggaagggagatgggagggggtatttatagggtgcaggaagggtggccgacttaatggtcgacgcaacgggcggcgcacggggctcgagggtgagggcgacgtgcagcgacggcggcgtgtggcagcgacgggacgcggcgacatgcagcagcgcggggctcgaggcgcggtagcggcacatggcttggcggcgcgtggtgcgaggcgcgacaagacggcgcgcggcgcggcagtgaagccgacgcgacggcgatggcgacggcgcgcggcgcggcgatgatgacgacgcgacgcgacggcacgcgcggcagcggcacggggcgcgacacgatgcgacgcgcgcggcgtgcgcagggctaggcacggcgcggcagggggagggcggcgatgggacgctcacgcggcgcatgcgcgagatcggcgcggcacatgggagcgatgcgacgcgggtcgctgggtgttcggcttgggctctggtcgagcacctggcggcccatgaacagtagccagctgggaaaatcacagaaaagaacaaaagggaaaaagggaaagatggaggggccaaactgaaaaatagctgggattggaattttatttgagatgcaatctatacattttgttttgagaactcaaatattttatttgaatgtttatttgtttgtttgtttctccccaaatgaatttgctttttaattagattatcctaaaatttatcctaatgagcccattataaatatagtgatgtatttgctcaatttatttgtgtgaccaattattttgtattagttgattttatgacacaagggacttaatgaaatgtcctaaatattagcttatatattcccatgaaatactcatttgtaaataggatcatgatagtggtgatcatcatttcatgtgtgtttatatttcatggcacgcatcacatggttcaagtatttaataattgttccataaattaaattagtaattaaccttccctttgtctggctttgttttcttgtgcgtaaatatttgtagggttatccataaataatatattctcataaatttatctattacttaaatttagatctttactttactttctttgtgatcatttacggttctgcaagcaatagcaatcataacaaccagcatgatgcaaaagttttaaaaagtttgaaattttagtgatttttattgtcggaaattttcagggtgttacaatatgcatatgaccgacgctaaggagttgtgggatgcactgaatactaaattcggtgctactgatgctagcaatgatctgtatatcatggagcagtttcatgactacaagatggctgacaaccgttctgtagtcgaataggctcatgagatacaaaccatggctaaggaactcgaactccttaagtgtgtcttatctaacaaatttgtggccgggtgcattatcgcgatactacctccatcttggagaggtttcggtactgcactcaaacacaagagacaggaatactccgttgaggggttgatagcgtctcttgatgttgaggagaaagctcgggaaaaagataccgcgtctaagggcgatggtgggcagtctactaccaatgttgtgcacaaggcccagaacaaaagcaagggaaaacacaaaactcagcagaccaccaacttcaagaagaagaagaacaacaacaatcctaatcaggatgagaagacttgctttgtgtgtggtcaacctagccatctagccaggaagtgtccacaacgcaaggggatgaaggcacctgcagggcagacctctaagtctgctaatgtgaccattggcaacactagagatggaagcgggtagtaatttacctactgttttttcagttaatcagtctactaattggtgggttgatacaggggccaatgtacatgtttgtgctgacatctcattgttttcttcttatcaggccgcacggggttccaccgtcctaatggggaatgggtcacatgcttctgttcatggtgttggcacggtagatctgaagtttactttgggaaagatcgtgcagctgaagaacgtgcagcatgtcccttctatcgataggaatctcgttagtggctcccgtctgactagagacggatttaagttggtcttttgagtctaataaagtagttgtgtctaaacatggatattttattggtaaaggttatgagtgcggaggcctgttccgcttttccctttctgatttctgcaataagtctgtgaactatatttgtggcagtgtggatgatgaggctaatgtttggcactcacgtttatgtcatattaattttggtttgatgtctcggctttccagcatgtgtttaattcctaagttttccattgtcaaaggttctaaatgccatagttgtatgcaaacgaagcaatctcgcaagcctcacaaggctgccgaggagagaaacttggcaccactagaacttctacattcagatctttgtgaaatgaatggggtgttgacgaagggtggaaaacgatatttcatgacgttgattgatgatgctactagattttgctatgtgtacttgttgaaaacgaaagacgaggctctagactattttaaaatttataaggcagaagttgaaaatcaacttgacagaaagataaaaaggcttaggtctgatcgtggtggagagtttttctcaaacgagtttgacttattttgtgaggaacatggcatcatacatgagaggatgcctccttattctcctgagtctaatgggattgctgaaaggaagaaccgcactctgactgacttggtgaacgcattgttgaactcgaatcatgtgttaaacagagttcctaacagaaataaggacaaaacaccatatgagatatggattgggagaaaaccatcactttcttatttgcgcacatgggggtgtttggcgaaagtcaatgtaccaataacgaaaaagcgcaaacttggacctaagactgtggactgtatctttctgggatatgctcatcacagcattgcctatagatttttaatatttaaatctgaggtacctgacatgcatgttggtacaattatggagtctcgtgatgctaccttctttgagagctttttcccaatgaaggatacacatagtagttcgagccaaccctctgaaataattcccagttcaatcacaccaccagaacaaactgaacatacacatgaacatgtcattgaggaggatgtcagtgaagctcctcgaaggagtaagagacaaaggacggctaagtcctttggtgatgatttcactgtgtacctcgtggatgacactcttaagtcaatttcagaagcatatgcatctcctgatgcagactactggaaggaggctttccgtagtgaaatggattctattatcgctaacgggacttgggaggtgatagagtgaccctatgggtgtaaacctgtggggtgcaagtgggtgttcaagaagaagcttaggcctgacggtactattgaaaagtacaaggcttggcttgttgctaagggctacactcagaaagaaggcgaatatttctttgacacttactcacctgttgctagactgaccacaatttgtgtgctactttccctagcagcctcacatggtcttttcgttcaccaaatgaacgttaagacagcttttcttaatggagagctggatgaggagatctatatggatcagcctgataggtttgtagttgaaggtcaagaaggcaaagtgtgcaaattgttaaagtctttgtatggcctgaaacaagctcctaagcaatggcatgagaaatttgacaaaacattgacatctccaggctttgctgtcaatgaggcagataaatgtgtgtattatcgccatggtgggggtgagggagttattctgtgcttgtttgttgatgacatactgatatttgggacaaaccttgaggtgataaatgaggttaaatcattcttgtctcaaaattttgatataaaggatttgggagtagctgatgttatcttaaacattaagctaattagaggtgagaatgggattacactcttgcagtcccattatgtggagaagatcttgaatcgctctggctacattgatagtaagccttctccaacacctggctagaacaagagaattgctaggaatcaactggaatactccgaaatcattggctcactgatgtacctggctagtgcaactaggcctgatatctcctttgctgtgagcaagttgagccgatttacctctaatccaggagatgatcactggcgtgtacttgagcgagtaatgcgctatctgaaaggtactatggaattggggcttcactattctgggtatcctgcggtactggagggatatagtgattataactggatctctgatgtggatgagatcaaagccactagtggatatgttttcacactaggtggtggtgctgtttcgtggagatcttgcaaacagaccattttgatgaggtcaaccatggaagcagagttgacggcactggatactgctactgttgaggcagaatggctgcgtgatctattaatggatctgcctattgttgaaaaaccggtgccggctatccttatgaactgtgacaatcaaacggtaatcgtcaaagtgaatagttctaagaataatatgaaatcatctagacatgtgaaaagacgattgaagtctgtcaggaaattgagaaactccggagttataacgttggattacatccaaacagctagaaacctagcagatcccttcacgaagggactatcacgaaatgtgatagacaatgcatcgaaggagatgggcttgagacccatgtgagttatattatggtggtaacccagtctatgtgatcggagatcccgtgaattagaacctgggaagaacaaaccattagtaaactagaggagagtaccaatcaataccctctttaagtgaagatgcatgtactctcgtgagctgcaaggcaggttggctatgccttaatgagttctgttggctttaattagcgaagatgctttcccgtaaagcattcttgaaagaactcacctttgtgagcttgactattggtcgcagtctatagagattttgggtgaatcttctaggaagcttactaaagacctaggagtatgacttatacgttccacccgaggggtagtctacagacggtctagtaccagataagactctgagtgaaacttgcttgtacaagagttgcaattcaaggcgtagtctattgttcaagttgtgagtaagtgtagcttggagttctaggtggatgttcaaccttaatcggtctccatcgaaccgctggtatataaatagtacattgaaaaaggcaaatctcaatgggattttgagatttggtgggggattgttggaattaatagatgggctaaggcccattcaaagattagttctttggaaaatcacaaaagcgcacctcatgggatggcatgcatgtggagtttagtaccaccttgcttattctaggagagggggacctccttaaaagggaggatgccctcctagctacttgaagcatgtgtggtggagagaagagaggaaacacacgtgtgcgctcgctggcctggcctggcctggcagggcaggcggcgcgcgtgcatgacgtacgcgtcgaatggtccgcaaaattggctcctcacccttacgcagatgcagcctccttttgcaattttgttttgctgcaagaaattcagatttgttttgttttggaaacattccgaaaaatccggtgcgtgaaaacggcatggagtccggataagttacgcacgacttatccggttcggttacgcggaatggagatcgtgcgggcgccctgatcaagctacctatctctatataaaccgagccgccgccttcacgcaacatacgcggaatcaatctagggtttgcctcctactctgtgctgcgccgtcgctcgtagactactccatcccgctcgccggcgtgcaccggcgatcgggagagtaggtctccggaacctctgccttcgacgtcctgcactgggagaatgcggcataaggtttttgggaagcgcttcgcgtgactactccctgttcgtccgcgacggctcgccttcctctccattcacgtgctgcgcgccttcgtcgacgcctgcaaccgcgagtagttcctgccgagcaaccggtctttccgccacctcggtacatgttcgacatgctgcgcatatttgatctgttcatgctttattgcttagtttacatgtgtagatctaatgatgcgttcatcctagtttacatctgcaatgtcatgatttatttatggaataaattaaatcgttatgtgcttataatttcaacatgacagcacaaaatataccagattatctctagttgtatttcctgcaaatagtttcaattgtatgtaactatttaattatcttttatttaaaggagcaagaaactataaaagtggtggtcgatgatggtgcagcaatacaaaatacatgtctgaatcatacatcattgcctgaagaagggatctctgaatcctacagggtcagcaatagcttatctgaactattgatggtaatatttcaaagtaatacactttttctctgaatcatacatggccattatgttgaattttgtttttctaattatcagggagcaatgacagatgctgttattgttattggtgaattctagtagtacagattataccccatatgcactcaggagtatggctcaacaacctccttgtccatcatgttcagacagttttagttcctagttctgtgtaatgagccataatgccatatgaaagttgcaagttacggacttgcaattattttgtgcagccatatgagcttgcagtaatcagcaaacatcttttggatttcattcacaatatcccacggggcgcagatcgctggggcgctggctcgccggggcggacctccggggtgaggtagggagcgccgagcgtcgcggtggcggccggtcgtggaggggaacgctgacctggccatcgcggcggcggagtagaacgagtcgaccagagtccgggacgctagtcattgggcagatatgggccggttacaggcctggtttgttttagtgttttgctggtctcacggttagatccaaatcggatggtccagatgagtgactggagagggaagtcgatttgtccgactttagaggatctgattcccactacaacaggcttcttcacctaccacgaaaacgcattcgcgatggttcggttctcccgttctcctaaattgtcaatcgtgggaaatgccaactgatatgctattatacagaacttcgctttacatctatctgttcaacaaaattcatgtgcacagatgatgtgtagacaacggggaaatcatggataggtgaaaatttcattttctcgagctctcctacaactctccaaatatcaacaatcgaggagaaccaagttgcaacagctcaagagtgaaaagctcatggaatccctttattatttagtgtgtcaaaggaaacagcagcacaccagtctcggctctagtattagcaaaatgaaagttacagcattgccgcagcggttgcgaaagaaaatcagcacattctggttccccagtgtgccagggagctcgaagcagactgttaaactcgttcaatccagcgtcaagagtgagtaggtcagaggagatctcatctcttccaccgccgagcttgctatcttgagtccacaacagtgccctcaggaagcgcagacaggtgtacgagagcgtgagatttttgtgggctatcggagccagtgatcttctccttcggccggctcaacaccttcctgacctcgttagctagctcgatgattgaatcatcttcatggcctgaacaaagcaacgtagcatcatttgtaattatactatgaaaatctctgtgagtgcggtcctgttgtccaaatatataagcagcaggccatcaactagcacatacatgtactgaaaactgatgcagtcattttttttatataaaaaaatgaataggaatattagaaatgagtatgtcatgagctttgatcaaataaagatatcgtaaaaagatctttttcttacatatgttggacaatgccttctccattgagaacaggtaatccctgttattcccattggggccattggctgtagcaatttgcctggtattaaaaaaaatgatcaagtagtcagaaaatgatgctaatcaagcagtaagccagtaaaagtgcaccatgagatgaatagcccaccttgccatgtcctccaaaggagcaggcccaagatagtatttgttgcctactggatcaggagtggatacaaagctgcacaagcaccaaagtaagtgagttaaacagaaaattaacaagttatatcatggaaatttcaatcgtgcagtttgaacccttacactagtacacctgtcacagctggcttcaaagaatctccttcctaaacaataaaattcaacaataggatattagagtaatgcaaataattgacttttattttctaaaataatgcctgatgcaaaacgagtaccttgtagaaatccacagagatcttctggtcatactcacactctcttctttccaagtactgaattgcaaaataaatttgtcaagataattctagcctcataaatctactcattcttttaatctacaaggaaaagaagcaccaaccttcattgcttcttgctcctttttaagcccccctttgacacagtatgcaatcccccactgcaaatattcatatcggactgtaaatacagctgatataatattcagaaatgaatctttggaaattagtaaaactaacatctctgtggtaatgataaagcctgagcaaagtcacatatgtcaggataatgattttcagtgcacagaacttgctaaaacagtaaatctggtttgagttcatgtcctgcctgtatgttatgaattaaggcaaatgacgtgtctttggaccaaaacaagagacaaatagcacaagagtgtaaagcatggtttgtgaggagaatccaccggcagattcctgctcagtcatctgccatctgattccagatttccagtagtcatctgctttacatgagcttttgagtccctaataggattgtgctttggtgccactgctcagcatgatatgtcaaactgtaaatatcaggtgcatgagttggtcagtcatgctttgcattaagctaatctgcagactgccgatccaccataccaatgtgagtaagttactagaggttattgcagagtcgtttttttagtcaaaaaaactataggttattggaaattcgaacagtgaaggtcagtatgcccctatgatgagggaggctacagggttattgtgttctttttctaatgatgttatagagttagttactgttgtattcctctcccaaataacaaatcaagcaaggcacagaagcaacttttctctccagtcctgcacaagagactatttaaaactgaagtattcaattaaaaaaaatccctcatgtagcagttatttctccaaaatcattgacacctttaagaaggttattttaattgtcatcaaaacttaccattttgtatggctatttcctaaaacaaaagcatctacaaggttcaacagagtatcggtaatgtcaccgatgcaaatcctacggaagaatcgtcaagatagttgtatttatatatagcacaataagtgaagtatgcttcaattcagtgcaaaaatttcaatgcggtgcatcggtgaaatgggaaaacgaagatgacagctcgcttacgcatatggcttcctcgtcggactcaagtgtgcaggtcctcgcaggatgctccggcgtgccccgatggtcaatgcaagctgcagggaggaagaaaaatatgaagatgcacacataaaagttgaggccaatatagaacagcggcaagtttaagctactgattctgcatttccaagcccattttccaagacaaccaggagtaaatctatcgtaccaagattgaaggtgcgtttgtagcccttgacgaagcccaggatcttctcatcgaagtcgaatccggggttccagatcagggagccatagccgaagacccagagcaccatctttctatgcctgcacattttgagcgcaaaaacagcagataaatcagaaagaaaatcttgtatactatcgagaagattgtaaagcttctcctaatccccaaatcgagatcccccgaagcagacaagaatcactctattcggggcacaccgacgaggattgcgacctcaaatccaaccccagcgggccattcgacgcaacaatggcatcaccacccacccaactaaccccacaaaccatgtaatctcggggaaaaatggctgcaagaaatcacctggcgagcgggaacggacgggacggggccaagtgcgcgcagcgcaggcgagcgagcgagcgagcagggcaggaggaggatcggatttttgcctccctcgggcgacggcgtcgcctcctcctggccttctctcccccctcacacgcgcgcgcccgcaccaaacccccgcttccgcaagctctctggttgggttactgttgttggtgagagggagagggatgggcgtggcgtgctgtatttatgccgcgcgagcgggtggggggggtggcgagcggcgggcacgtcgtctcgtcgacgagagaaatggttggtcgccgcgtgatcgcgccgcggtcgcttgggattaggatcaggatgaggacggcgatgggggccgcacggcgcgaggcacgtgagggccgcgaccccgtgtgtctggctccctgcagacggaggggagaccgaggggggcgtgggttctcgcggaaaacgagctggttttggttgggatggccggcacgtgacgggggtgggtgggtgggtggtgggggggcacggagatacggggggacaccggacaccgacacgctccgtacggggttacgagttacgaccggtgtttgggagctatagtagctggcacgatggatctggacgggtttgggggataggggattggggagagccgtgaggatgtcccggttcagtggacggtcgggtgtggttgaggtcggccacgcctgtcgcgagtttgactttatttactgttgatgtgacttattctcaactcctcctccccttcgtatgcaacatggaaaacgatagattaatacataactaattaagtattaattaaaataacttaaaattttggttaatataattttctaaagtaactttcttactaatacttttgtaaaatacatatcatttagtagttgagaaaacatgcgtgtgaaaaagagaaagataaagttgagaactaacaaaaaaaaaaaactacatagtcgtcgttgtgatacggtcacatctaaaattcgcaagcgcaccattatcgatgtaacactcacctccattgacgcgaaaaacaacacaattgtttgggagatctgcttaactctagtgcaggtctccgaaaaaaaacgctagtgcaggttctaaattattgatgagatacgggcgtgctagtcagtttgatcctgcgactaacaagacatataaatatgtaaatgatcgaaaagccgatcggctaacaagcaaatgtagcgatattagctgatatcgatactagccaatgtccatagaattttgaacaatcgactatatgtccgatatagattctaacacttgtataaacaatgatagaactttaacaaacaatccaatcagccgattataatataatgaagtagatgcccgatgaaccaatcgacgatatttatgctgaatattaaatgttggctcagtggttaaaacttacgttggctggaagtctggtgcacaaataatttattggctagcactccgataaaacataggtaagaaacctatcgacttaacaatacttagattatcaacaataatgtagtaggtcaaacctaaccgatgattgtatataataatctaatactcaataagccgataagcctatgaaaacatgatggacataccacatatatttaaaacaacattgtaattgtagagatatatcgtctaagacagaagaccagacctaaccgatacagtctcaactaaactaatgtgtctctaaacacaatgtgattaaagatagaatcgaaatatcagttaggcaaaatatcaaccgaaccagagtgatccaagaggtcaaagcgatacagccatgaataacaccaatgcagccgacataattcaagggccgacggaacatagggcttactcctttgaaggagatcgaagccgatgcagccccgtgttaagtgccaagttccgccggtgataaataaaaaccttggaaaataaggtggtgatgcgtcaagactagttgtattgatcgagagatagattacagggaccccgggtgtacgtatttatacccataggccgataagagtcctagtcgggcacgacacaaactttccaaaagataaaaggaaaaacataagttctgattggacatgacacaaactttcctaaatacaaaacttgcctaattaatatataaactcaagctgctatgtcgtggtcttcgtgactccttctcgaacccgttctcttctggataagcttttaatcgactgattgtaatctttccttaaccgaatccactaaagaatcttatcaaattttggcgttaacattctcatagcattccaagagtatcgaatcatagggaatgtgtgtgtatatctaagaacataattcaatccaagaacaacaactaagggtaggcttagactaaaaaggattcctatgggttaatttactagtgttgagttaaaggtaaaactctgtcgattgcttcgggcacaccggctctccactggtctctcaagctgagtctggcctacggctctatgatgtacccgaatatggagggatacaaagggcagacatgactgtcacgacctgccgcctacctcacttttcgtggagcacacggtaaccgctaacctataaatcacgcctaagttattgattactactctagtctcgcgcatgaacttttttttttatccagagtcctagtactagagcagttaataattcaattaagcgacgaacccgcaacaatgggaatataactcactcaagcaaataaattaaataccataaggagatatcgaatacttactttattgaaagaagcatccgccaaggtacaagcgagagcagaagaacaacaactccagtgcttcttcggaactccagtggaagaatgttgacaaaaccaacttcccggagagaactccgatatttgggcactccttctggagctcccctcactctctacctaattccacatactaaagtggtgcctaaaatataaaaatgacttgtacttcgcattgttgtgcaagttaaaagtgagagcttctccttcttttatagggtgtttatgatggttgtggaggttggttcacccacaaccgtcattggggagtgatccaggccctccacgtggaagcagatggagggtggcgtctatggtggttaggccaaactgtgggccccacctctcagctgctctttcggctgggaggctgacaggtgggcccctatggcactgcaccttggttggatccattttaagtcgattttgattggccggaagtgggccctccaatcctcatgctcacatatgattggccggaagtggcgtcgcatggcgggtgtaaatctctccaaattcaccaacataaatatatttaccaatactagtggaaatggttagtaatacccctaccactaagtttgatattatattttgaattcttttatgcaagagttgatagttaaagtttgcacttaacaactgtcaacaatagcctaaaatattttcaagagcacttaaattcctcgactttggatctatgcaaagatttgtactcagacttttttttaaaagtgctccttttaactccagtgatcgtgcagaaatggcatgcatgattaggttacgaatggaattagggatctaagaggtcttattggagtgtgaagagatggatatagggtttagaggaagggtccgagtgacggtggtgccatcggagtcatgagagcgaagtcaattgttgcaacacaaaatcgaaaaggttacaaggtgtaacagcactccctccacaaccgtgcagcccagcctaaacgacaagcgggccactaacacataccactccacttacaattttgccctcgctttgtgcaaaagggttaaaccggaaatgataaggttggagggaagatgccttataagttggttccaaccttgctaaactagcaaggtggtactaaacatgcccacacagctctcatgggccacacagacctcatcctaattggcccaggatgtcacacaaggcgacagggtggtgaccggatccggcaatgctagccatcggagatggagaaggctcagtagcatggggaaaggtcattatcaaaattgtagaagaagacatttactcgagtatggaatcgatcaagaaaagagctgggagggtagaagggaataggtgactgacggggctagcccagttccatggaggtgttgtcgaggatgagttggtagcaacgacatcgtgtcacaagagtatgaggaaaaaatagagcggacgaaagagatgaagatataagattccatgctcgaaccttcaaacatgcttagccatgtaaacaccactacaaaaatgattttttccgtgaggtcgaaaggggttttcgcgtgcggatctcccatccgtttgcaccgaggggtctgcaaaaattcgattttttcgtgagggtgacacactcgcacacgaaaatccaattttcgcgtgcgggcacttaagccgtccgcacaagaaaacaaaaattcacaacaaagaaaaaaacgaaataaaaaccctagccctggaaccctaatctagccacctccgccgtcgccgccaccgtcctgcccgaggcccgccgtcgtcatccctgcggtcgccggtgacggattcagccgcccgaggcccagcggcggaggatccaacgctaccgttgttgggagactgccgccaccatcgccgtcatcgttgccgccctatccgaggcccgccgtcgtcattgccgcgatcgccaatgatgcatccgccctccccacggaagcaggcaacagccgccaccctcctctccggccgcaacgcagctgacgcccctcccctctgccggatctaggaggggagggaaggaaggggaggggagctggagggagagggagtagaggaccagcgcacaccgtcgtcgggagggaggtcgccacgcgccggattccgctcagggggagggcgaccggccgccggatccatgcgaggatggccgccgtcgccggatccatgtcgggtttggctgccacccactggatcccgcgcctccaccatcggagggggccgccgtgccctcgcctgccgtcaccatcgcctacacccgccgccgtcgccggattcgtgcggggcttggccgccgtcaccggagggggccgccattccctcgcacacttatggcccgtctgcaacctattagggtgcttgtccaggaaaatcatttctgtactagtgaaatttgaatatttttcccaccaaacaatcaaatggattgtttttttattttattggttaatatggattggttttgttataatagtcgttggtggttacaagagcctcagtagcaccttaggtcctgggttcgactctctatgagagcggattttccaggatttaacggcattgtgctttcagtggtaggcaacatacccgtcgacaacaagacgtctgcgataatttcgtcaatctcaagtatttgccggcccagttttcaaagatgctcataggagtagggtttgggtgcgtgcgtttatagggtcagtgtgcgtgcgttgtgagtatctgcgttatactgtgtaattcgtaaaaaaaatcatggtgaattagtaagtatggagaaatcatttaaaaaaaagatatttagttacatttatgccaccgtaaaagccaagttaagtgatgaaacacgagcttcttgacaaatctcgttgctggttcaaaggtaagctgaatatacaaacatacatataaagagtaaattatttattggcccatttaagttgaccgtatccattatttgctttgaaattgcctctccataaaatcgttctcaacttgttttcctgatcggtgtacttcagaaacagccacaagtttttttcgagtgaaaaacattcaggtgtaactatagcataatacactataatgtacttatattgtaactacgatataatttatataaaatttgtatttaactatgatttggttaaatagcgttgggatcctaaacgcgacatatgtgaaattttctttctaacatttttttctgttcacatgcacaaatctcgatgtggtcttatggtcacaaatttgacacaaatctcgatgtggtcttatggtcacaaatttaaaagttttagaggaaagaaacttgaagttttctagcaattctatttccttatttacccattatattgatttattgttaagggcccttttgaatcacaggaatggaaaaacggaggaataggaaaaacgtaggattctgacaggaatgtaagtgtaaaacagaggattgcaaatcacaggaaaaacataggaatgatcgtttgattggaccacaagaaaaacacaggaatttgaggagagataaagactcaaaggatttttttccatgaggttctacctcttgttaaaattcctctaaaacttgtatgggaagagacattccataggaattttataggattccatagggttcattcctttgattcaaagggctttgtaggaaaaatttctataggaatgaaatcctctaaaattcttatgaatttcctttgaatcaaagggggcctaaactacggttaaagaatgttatatattactccctccgtttcacaatgtatgtcattctagcatttcccacattcatattgatgttaatgaatctatatagatatatatgtctagattcattaacatcaatataaatatatataaatatgagaaatgctagaatgacttatattgtgaaacgaaggaagtagtaattgcctttcttcttttagatgcatagccaagtggttgtgcctatgcccgtggttgatgaagcccaagcatgcgtgcagtgcaagtattagccgcccatgcagttcaagcttctcaaattcaacgacggtgaacttcatggatattctttgctgagtttggtgaagctcacaccaaaatctagagtcaacaaacctttaaattgtgctattttcgtagagacagccaaacgggatttaccggtttatcaagcggagttcatatcaaaagaggctcaagaagggtatagttgtcgtagccacaccacaaatccctctcgattggttcctctgctgctatttggtttcactagcaagtttgctttcttagtttagctaaccatcttttagatgaagatggttcaatgctttaaatttatctgtttggcgatgtattggggattgtttctgagattttttttttaataaaatgatgaggagaaaggtcgagaggaaatctctcaagtaagagagatctgtcattttgtgttccatttaacagtaatccaacagtaaattagtaaaacgggtaaataaggcataacacagagagagagagaggccttttcaaagggtcaaaccattaatatggtcaacttacataggcaaatcaataatctattcaaatatatgatagacacaatgcgcatggtttagaggttggttatcattgttggcaagagggcactttgtaaatttgttccaagtcagcttggaagacatggtcgctttttaatacgcctatatatacttcgggaaaaattgcacccagttgctaagtcaaatgtatcaaattgcacaaaatttaagttctttaccaaatcgtggcgtattttttaaaactgaaatcatgacgtacttgcccacttgtaatgtgggagcaaatttctttttatattttctttgcggatctttatgtttatttaatatagtttcttaagggatttatttaaaactctagttgtgatgcatatatatatatatatatatatatatatatatatatatatatatcttacctactagtacatgttaaatttatcttaattatttatgcggtactcgtgataataacattgatgtttaggctgatgagggggattaattcttcactacatcaatattaaccttatgtaatccgttattaaattgtggtgctttttttgaactgcggtgatatttattgatgggaacacctaataatgaccataaggtcacgtcaaattttgctgtcgtcctatatattctgaattggcatgacatatagagaagaaatatgatacgcatatagttgctacatgtattattttatttatgttactttattcagtcttgcaaactcaatattttctagtctacgatccagcgacacattctgatatttcttaaggagatatagagcagttcaatatgctattcgtgcaaacatgcatgatattcgaatatattcctgcggcctatcctataccacgaataaattttattcggtgctttttgtgaactgcggtgatatttatcgatggcaacacctcataataaccataaggtcacgtcaaattttgctgtcgtcctgtatattctgaataaaagcgtatccagattcgttgtactcaaagtcacatcatattttaagttaattattttgggatgaagagaatttgccaattgatgaagtttacaactaggtattagaaaaacatgatatttgctagtagaagaattcacaaagtagtggcttcattaggaaacagtctaaacgtacttgattgtttatatactagtcattattttatattaaaatgtaatatatactaagcatatggacaatgaggcgaaagaaaatgataaaaatacaatcagttctattcttatttctttcatttattcttttgggtgtcccattcttttttaagaaattgagtacatacaccttagaatttgattaagggtacacactgctttaagctgagttcttttcttggagtttcaaactcactcccctcattttacacgtgcacgcttttcaagctgctaaataatgatgcaaaaattactatatgaaagttgctttaaaaatcatattgatttaaaagaaattagttaatacttaattaatcacgcgcactccgttttctgcgcacagggaggtgaagttcccaactccaactccacctcccaaacacttgtccttgataaaaaccccctcttctatgtctcttcttatcatttatttcaagtaaactttttaaaaaatacttttagcgattataaaactaaaaatttagcatcaaacctttcatacaatcacatattgaaagtatcatatcataaaactataaatttagtgataactacatatttttagagtttagatccatagcactataagttatttatacgtacatatagttttgtgataattgatattaaatccgtggtttttatgatatgatatcgtcaatatgtagttttatatatataattgacactaaatatagttttatggtacatatttttaaatcaatataagtagttttctaataattggacgaagtatacatagttttgtaaaaaatattctttattatctcatcttgtgtgtgttttggtactacacagcacagatgacacttttccccgatgaacagttctcttggacttttgggcggcccaatatgtgcgaacgttgtgggctggccacttcagatcgagttcagaacttccatcgtaatgtccgattgtgattcagagttcagaacctccatcgtaatgtccgattgtgatatgagaaaactgaatgcagcctaaccattttggacttgattatttcatgcttcatattccaataattaagcttgtcccaggcaagaattgctccctagctaaactatgtatggcccaggatttttgagtcagctaacgaatggcctaacggttttgctagaaaactatcgttatattaatttctcgattgatttcagccaaattttggggcatcctcacatggtgtgcacggattgggatcctctgacgtgaagtcagaggaacatagtgactgacatgtgggcctcaccgctcgcggggccacctgtcagtgaccacgtcagggacagttcacatcagaggatccggttccatcgcgcacacatgttccttgctcttggttattcatacgtttttcttgtttttcccttgttgtaataacttattttatcctaatatggtttgtacttaaaaaaattaatgtaagttttaaaatttatagtgtgagttgtataatatatatgtactagtgtattaagtcgtgcattcgcgcgactacagccatcacgttatgaatggtgtgtaagaaaacatattaacgttaatcaaaaattataatttgttgttcaaaagtataaaacatatagttattttatgataattttattatggtgtttacgtgactataacctccctctttattaaatatattttacacattatttacagtgattagcttaattttttataattaacaatacattttttttcaaacatactttataagaatattatcataacaacaaataatttaacatacattattgtgtccattgcctccctcttgttgaacttttaaatgtttcatttctagtaatagtgtaaatagacttgtaatttgaattgtgtgtcccatctttagtctgaacaaaatagtgagtccaaccataaacaccattttcgttgatgcttttagcaaatttaaattcttttgcatacatgaatatatgttaagataacgtatttagcagtaagtctatgtataacacgaattgttttatcttgatctgtaataaataaatattaccatgacaataaataatttacaataattatgctaaacttgataattttatgaatggtgtacatgtaagaaaaatatattaatgataatatgaaattacatagtttgttgtccaaaacatataaaacatataattattctatgaaataattttacgatggtgtttacgtaactatactttcctctcaattaaataagcttaatttgaaatgtacgaaccattttttgtttaatgctttttacataaacaccattttcattgttgcttttagcaaatttactttttttttcttttgcatacttgaatgaagtctaggtactatggttatgcaatatctttctaccatctcaagtaagaggttcttgtgtagcatgctagaaggatctagaactctatatattttttaggcaaattttgctacaggacactatgatttcgtggttttagccatgggacactgcccaaactcacttttagagaaaacactccataaacatggtaatttgccaatggataccgcgccaattaaaataatgatttttggttaaggaggagagagaaatcgcgtgaaatatcaaaaatgtccttgggccacatgtcaactctccctctctcttcctttctttctccctcctttctctcttctccccgtcacggcttgctcggcagcggcggcgacgcctggagcatgacggctgggcatgccggggcgaagcaagggcggctcggcggtggtcaagggagatgcggcgggactccggcgaccattcgcactgcaccgatcacgaagcacccaagcacgaatcgacgtccaagcatgggcgattgggccaatcctcgcggcgccggctccgttaaaatcgcaggatgacgacaccagcatcatccagtggctagacgcacatccgcggcgctcggtgctgtacatctcatttgggtcgcagaacagcatcagcatccatcagatggcggagctggcgctggggctggagacgagcggacggccgttcctctgggccgtccagccgctggtggggttcgaccacaaggacggattcgatcccggctggctccccgtcggatttgaggactagatggcgtaggcaagcaggggactagtggtgggtgggtgggcgcggatcctggcgcactcgtccacgggcgcgttcttgagagcatccgccatggcgtgccgctgctcgggtggccggtgggggccgagcagttcttcaacgcgatggtggtggtggagtgggggggggggggtctgcgtggaggtggcgcgtgggagcctggagagctcggtggtggagagtggggaggaggagacggtaatgcgggagaaggagaagggcgaggcgatgaggaggaaggcggaggagatcgcagacgcaatggcagcggcgtgggaggggccgggcgggtcgtcggcggcgagattggaacagtttctcagatgcgttgaggcgtcggcgctccgagcgtcgccgccgccaccgagcaagccgtgacggggagaagagagaaaaggagggagaaagagaggaagagagatggagagctgacacgtgggtccaagggtatttttgatatttcacgtgatttctctctcctccccaaccagaaatcattattttaatcgaagcggtgtctattggcaaattaccacgtttatgaagtgttttcccccaaaagtgagtttgggcagtgtcccacgactaaaaccacaaaatcatagtgtcctgtagcaaaatttgccatgttttttattgctacttaagtttgatcctattgttaaaatcgattccaactcttttgtcattttgtgaatctgatggccaatgttcatcggataatgtggcacatttatatcttaggtttcacttttcattcgttgagatttgcaacataaaagttggttgatttctctactactttaaaagcggagtcgtttttcaaatgttccctactacacgtcgcccgctcctttgcgggtaagcatccattaaaaggcacacccacctacacaactagaaaactgattctttcaaacgggaaaaaaaattacaggcggtcattaaccccgtccgcactttaaggcctccaaaaatatacaatttttacatgcgaccattatcccagcctgcacttcgttatatcggtttattaatgaagatgaccaaattaatcggaataaattcagtcgttgaaactgttgtctgaactagtgaccgaatcatttgatttcgttttattttgcccgtccctaagctcacccgctcggtcggtgtgaaacgaaagaacacgaggaggaaactcagagagggcctttgccgcgggcggatccggtgctatcttgctttcggtaaaataaaatgttcatggcgcatgcatatacatgtacaaattaaacgatatgcccatacgtatgcaaaaagtaaagagcacccaaagctaccaactaaagcacatcctcattcccaataggaaagttacaaggttacatatgctttgacaaaaaaaaatttcccaagcatatatgattgagcactttgtacgcacaaaataataaacagaaaagcaatgtcatatgtgcagtagctagcagcatatattctggtcttatgaaattgctgcaacttttttgttcgtgcgccgagcataaacgggtttaattaacttaattcaccccgttatgcatgtgcgattgtaacggttcgtcggtagcttccttgtaggaactcaccaaaagcaggcaaataaacagaaggaagggacgacattccattcccagagccccatgcacttcatagctccaacatgtgaggcgttctatcgtgcttggatgttatatatctggtccgtctatcaataaaaatctaacggttcaaacaataaaacaaagatgtcttacaaaaggtagtaaaaaaatgggccaggcagttaatttgtagattaggtgaaaggttaaatatgtaattgtcactacttgagaaatcatctttggtcggttaccaaaaacaacaatactcccggttgcttaaaaaaccgggggtttaaaagtgcaataatctttagtcccagttagtgttaccaaccgggactaaagatcatcttttgtcccagtttatttattggcacgacgtgacaggtctcctaatatttttaatcccggttggtatgaataactgggactaaagatcagatttttagtcccggttgtttataccaaccgggactacaaatcagtttcccacgtctcgctctctctcttccatcattctctccgcgcgcatcgatctgagtcctcatcacccttatctcttcctcccctccactctttatctctccgttcttttcctcaccttcctttttcactctcatctcttcctctcccccttcttcttccacatctgagttttcctctcatctcaccttctgttaagttttcctctcttctcttcctcagatctgcgggacaagcggccggcagcggtcgggcccgtgccagggagtggcggcggcggtcaggcccgtgtagggcgggggcggcggcggccgggcccgtgctgggcggggatggcagcagccgcggccgggccgtgccgggcgaggaaggcggcggttgggccgtgccgggctagggaggcggtggcggagtgacagcgaccaggcggtggcggagcgacggcggcccgccgcggaaggtggcggcggcggcaggctccatggatttttttcttttttttctctttttccttctcgttgtgtgaataattgtttgttgatttgatctgtgatttgagaatgatgtgtgaatgatttgtgatttattgttgtggatgagttgggatattgagatattgggttgttgctgtggatgatttgggatgttgagatgtgtgaacgatctgtgatgtgtgaacacaatctgtgatttattattttttaatgatttggagatatttggcgccagaaaagaaaaaaaaggaaaaaaataacttttgtaccggttcgtaacaccaaccgggactaaatcggttcgtaacaccaaccgggactaaagtttagtcccggttgatgttacgaaccgatttagtcccggctggtgttacgaacttagtcttggttatttcaatcgggactaaaaatagatatttttaagtcccggatacatagtcccggttgtaaaactgggactataggggttctcaaccgtgattaaaaagcgattctccagtagtgtgagtcccttttatcagattagatatggtaaatagaaaatctatttttagtcttggttatttcaaccgggactaaaaatatcttagtcccggatacatagtctcggttggaaaaccaggactataggggttctcaaccaggattaaaaagcgattctccgtagtgtgtgtcccttttatcagattagatatggtaaagagagggcgatcacaacttatgctatgcaaataaaccatatatagctgaacatatagattatataacaggcgataaatacctgttgataatgtacaatatttaaataatattaattaactttttatgggaaggacaagttgattgatgtgtagtttattattgtaacgcacaaaacaacgtagcaataccctatggacacacgcacgcaaaccctacccctatgagcatcttcgaagactgggccggcaaattctggagagattgacaaagtcaccacaggcgcctcgctgtcgacgggtacgtcgcctaccactgaaagcacaacgccgttaaatcctggaaaattcgctcccatggagagtcgaacctaggacctcaggtgctactgaggctcttgtaactactaggctacaggccctttcgcaacaacgtagcaatatttaatacactgaatgtataattaatgataaaactaagtaagtaatcaataactatatattttcctttagttaatctatatgctcagattcatatagtgttcccagagaaaagaaaaaagaaagagatttttaaaatatttttatgcccagttatccttaataaatcaacggtgtgtgttttattggaggtggaggtacttgaggtacctctcaagcacattaaaagatctcacaacatgtacttaccccaatacattcatccgtgtgtgaatcgtggttgctgaggatcgagaaaacattaaaacacccctacacataagcacggcgaaccactgatacatctgccgcacggccgctcctacatcatatgtaaacctacatataagtccaagtccaaactaagcaggggcggatccaataatagattggagaggttgatctccttcttcctcctctccctattttccctctcctctcttcttttctcaatgatcatctagtggggtaagggagctcaacccccctaaccatctgcccatgaaactaagggagacaacgtacattgattgatatgttgttggagagcctcgcgctgcttctgtcggagatatagatttttttttaagtaataggagtttataaaacccggcttctacaccaacgtggtgcatacaactacagaaattccaagtgtaatagcttagtcattacacataagtttacaaccaaaatgagcacaaatgctcaaataccctacataaaactaaaagagcacaaatactccaacacctatcaaagtgaaaagagcacattttcttctctcaaaatgagcacaattgctcaaataccttattttcttctctcattaagtcatatcaccttaattctttttagtccttagatgattaatctatggtccaaattacctccctcctttttttctctcataaagctacatcgctttactcttacatttggatcatcattctacatactatttaaattatcataaaccatatcaacttatgtgagctcatgttgtctagctattttacacattatttttacttattgatatcgtattgaactcctgcagcaacgcgcggagtttcacccagtatttctaaacttcctaccgcaccgtgcgaggtatccactagttaaatatgtcgacaaaaagtaaaggaagcccgcggtgcaaacatattccatgacgtctttttttttcaatttcttttactattatgtagaagacattcgacacggaaaactaaccgtacaacctaacattctcaagattcttacttagggtgaattagcactataaattataattatgtcgatatattgtcgtagtattgtttttctgatatttttccatgtgctaaattaatggtcaaccatcaagaaaaataacttctgatgtgaagtcgtattttcttgtgggttcacccagacaggacataggatatatcatgtatcctaattctagtagtgatgccactacatgcacacacacctattagttagcaatattgctaactagagtaaggatcattagtggacctattcggctgcccttatttgcactgtgttgcagcttatacggacagtactttatatgtgcagctgtagcgcagccgaacaggcccagtaagtccttggctaaaaaggtcccggcgatccactattgaaatttgaattaatttggttagccaaataataatttctttggccaaacaatttacctgaattttagaaatttcgatccaaggtattacgacccaaccatggttacaagtacctgtgatggttgtaacgggacattccctcgcacgtacgtacaaggataattagctggattttccattttccatgtgaccaagaaggtcaattttaaaaaataaaaagaaaatattttttatcgatatgacatagatatactcttttcaaaataattagtaacattatactgtcatcgtatctgggggacgcaaaaacgctggatatgacggtgggatgcgcgagttcataccaaccatttgcaaactaaagataaaaatgaggataacctgttatcggataattggaaaaaaaatatgagcatgttgaaaaccgaacacacatgactcaccgctgcactatccagtgtatctccacccatgcgtaaacttgcatgagtttgtgttgatgacgtcctgagttcgcgctatcaactcgcacgagtgacgtcattagtttgtgcggtgaaatggcaaactcgcacaagttcacatggtgaactcgcgaacttgcacgactccatgccgatgacttaacgagttcacgcgttggcagtgtgaactcgcacacatcatcactgtgtcaccagttctatatctcgcggatgtgacaacggtataatgttgctaatagtttaaaatgagtatatttatgtcataccttctaaaaaatatattttaaaagaaaaatcgaattttgtgccgaaatcccgatagtttttctcctcccacaaccgaccaaggtacaattgattccgtgtcgcatatctgtcttaatttcgtggaaggccatagcggagagatcaaaatcccggccggcctgattgggttatcttatcctcagtcctgaacacaccacttgatctccacaaagtcgacacgcaaggtgcatgtaaggttaccaactgccaaaacacaccaattgtctgatagtagtaggaaagtagagcccggacgggagaggagatcgatgagacctagcttgacacacacacacgagagagaaaacgaagaaaagaaagccaacgaaaaggcaaacgacgaccaaaatattgacccttttcctccctgcaaccaccaccaccacgtcccaaactcgcacgtttctccctttctcctcctgtatacgtacgtacgtgccgctttcgccacgcgccatgcatgcaccactgccaccactatcaaccacacaccgttctcctcctcgcgccgcctatataaggcctcgcacgcatccatccaccaggtgcacatcacagccgttacagctggtcactaccaacaagtacaacacacaagtcatcacatatatatacctcgcatcgcatcgattccatcgattcgcgcggccatggcgcccgagctgtcctccccgtcgtcgtcacctcgctacaccgttggctacgcgctgctgccggagaaggtgagcagcgtcgtgcggccgtcgctggtggcgctggccgccgaccgcggggtgcgcctcgtcgccgtcgacgtgtcgcggccgctcgccgagcagggcccgttcgacctcctcgtgcacaagatgtacgaccgcgggtggcgcgcccagctggaggagctcgccgcgcgccaccccggggtgaccgtcgtcgtcgactcccccggcgccatcgaccgcctcctcgaccgcgccaccatgctcgacgtcgtctccggcctccgcacccccgtctccgtcccgccccaggtcgtcgtcagcgacgccgccgccgacgcggacgagctcctcgcccgcgccgcgctccgcttcccgctcatcgccaagccgctcgccgtcgacggcagcgccgagtcgcacgacatgcgcctcgtctaccgccgcgacggcgtcctccccctcctccgcgcgccgctcgtcctccaggagttcgtcaaccacggcggggtgctcttcaaggtctacgtcgtcggcgaccgcgccacctgcgtgcgccggagcagcctccccgacgtgccggcccgccgcctcctcgacctggacgccgagccctccgtccccttcgccaacatctccaaccagccgctccccccacctgatgacgacggcggcgccgccgacgacgacacgccggccgccggcttcgtggacgaggtggcgcgcgggctccggcgagggctgggcctgcacctgttcaacttcgacatgatccgggagaggagcgaggagcacggcgacaggtacttcatcatcgacatcaactacttcccgggctacgccaagatgccgggctacgaggcggccctcacggatttcttccttgagatgctccgtggcacaagacctgttcctgagcagctgggcccgggctcgggcctggacatggaggcccgcaagctcgagcctgggctgggtatcggtctaagagaattggagtctggccgagctcaggcctagctagcactccgaggctcggtgttggcccgtcagctcggcccggcccgacccagcgtttgaacatgtgtgcattttatactttgtaaacaataatcaatgaagccaagcaaatgctacaagtgcaagctaaacctcaaaggacggtgtgtgtttagaagattattagtacatgttcagtctaatctagtgatccaagtaatcaaggttagtggcaacatccagccctttaccttaaatggtgagaaatttaacagattgtattcgttaaatgttcatgtgaagatccgagtcatcaacgcgtgcatcaaacttttaacttaaatattctctgtaaaaaagaactttgaagggatacaactgagaagtaacctatcatcctcttttgctttttttttaattgaacttatcattctttttgcatgcttttatgcactagcacagctcgattctctagtgcaaagtgcgtctatatcaatgtgccagtcgatatacatgtgcgaaatttcatatccagctagtagttttttaacatcaacttgttgttactcgactttgctatgtgctgtcaggtgagctttaactaacaccactcaaagtatcattaatctgtgatactcatttgctcgtgagtattgtaattgtttccccgttgcaaacctgtgagtttatataattttgtgatgaatgcaaaccttttttttttatgcaacggttttcatatttctgtcccttgggtagtggagtggctactgtaaacatccagcatacttggctttcatggttcttcaaatcttgctgcaataatggaatcacattgaacacgcaacagaacagagcagcgctatttcagacattggataaactgaagtccagaattcattcatatctggagagaacagtattatctcagagaaaagaaaaacaccatctcttaagctaagaaatcatttcggaacagaattttgcaaatattactagtaacatagagtacttaattttgtctgaccaaacgaaattaagggtgtagagtagccctcatctgctgctgaaacgatcataacttctggctctggattcggttcatatcgagattatgtgagctttataccagtcaattacttaattagcaataatttaagtacaattagtttgagatatccagaacacgagtgaaatcaaatctagtgcccatattaagatgttccccgttgctaagagtgttggaagcaaacttttttttttaacgcgtagaaggattgcacgtcaatatattagaagaaaagagttatagttacataacgcaatcagctagaccggcttatgccaagcgaagggagaaaaggcaaaataaaaagctgaagcttagaaaactacggtggctaaacacaaactccaagcagcgagaaggggccgagccatgctacactcccaacagatcccaaaagcggcaacaacgccagctaaagaccacagatggcattccgagtggatggactccagaaccactgagactgtagagaaagcagagtcgaaaaccctataattccattccttccacagctgccaagaaaccaggagcaccagagagtcaaagccggcgcggagatgctcacgtaagcaggccctggaggacagccaccggtcctagaaccagctgcacacggagctagacctgccgagcaaacacgcagtcgaggaggatgtggtttgtcgtctcaagatcctgagcacaaaaggggtaggccgagtgactacgatgccatgcttctggaggagatcagccgtccagcggcattgctggaatgtaaaccaaaggaagaacctacatttagcaagaccctttgcgtaccaaaaatgattagcacaggcaaagtaatgctggccatagaagaaagcctagtacacccaacgcgcttaccgctggtcagacatccaacgccaaacgagacaatcctcgacacccggcgagtgctgtacgtgaagcaccgcatcccaaataaggagaaactaggagatgaccaggacagtgaggtcaccgtggatgtcagagacccacaagttgttcaccaggccagaagcaaccgtgctcaaacctcggagatgctagggaacggcgaagaagagatctggaaccaaggatgccatcgagcggtcgtcgatccattggttagatcagaagagcataaactcaccatttcccagcatgatgaaagtagatgccgcgaacatgtcagagacggattgctcaactggggccttcaggccatcctagtaggaagtggcgaagctatattatgttggggggtgcacatggaccccccctccccccaaattcctaatttctcactaaaaaacactagaatgtacagtgttgtagtgaaattttctagattctcaatggtagtgcaccccccttgttttgatgctagcttcgtccctgccagtaggggtgccctgagcactgaagccagagccagcgaacacgcatggcaaatcctgccaacctgaggtcaggaatccccaacccatcgtaggtttcgggacgacagacgttcgtccaggacacccgacactgccccccctccccccaatgagccgagtccatacccatccacaagaagacgtcatgtttcttgtcaacggccttaataacccagactggaaggctaatcgtcatagatacatggaccgggatggaagagagaaccgactggactaacatagaatagccagctagagtggtaagtcgtcccttccaaggcaggagtcggtaagagactttatccacaagggtggaagcaaatttttgctttgttgcagcaatagtgtgcacatttccattccttgtcttaaaaaaaatgttttaatagtttgtcataataaaattgaatcggagtagcatgtggcacgatgatggaatcgtggatgtatgaacaaaatattacaaataagggtacgattgtaatatgagatgttagggagattataaagttgtcgctggtctcgaactgtgattgggccatgtcatccgaaaacatacgaccgtccgatacaaccatggggtaaacaaggagcgttagatcagatcaggaaatctttcaaaaaaaatgctcttccagatacttctctcaacttccggtcctcccgcctatgcacatttttatttttcccctccctcccgtgcgttgtggtgccgcatttaccgcctcccctcctctcctcctcgccgcaaccgtcgcggcgacgcctcctcccattcccgtcgctccttctcaccatcccttctccgcttccacctctgcctccccctagccaccgaattttttttatctaaacacatgcaaaccactaattacaaatgtgagcacacaacaattacatttaattatttaggcaagatgctcatatacagcgatatgtttccctctaatcagtagcccaacaaactggccgttgaactaatcatgttagcctaacaacccacctctaaaattggttagttgcatcattacggggagttttctccattgttcaaatctaattcatccggtagtatgaaaatcatagggtttaattagggtattatactactaaattttcaatactagcgattcatattagtggatcaattgtttgctccatgctagcaagtttgattagtcgatcacaatgtgctcagaatagaagaattttagttgcactatggccacgctaacactgtcactgtcaaaggttatattagatggtttatacatacacacaccatcatcgtgtcgaggctaccgtcatggcactgagccaaagctaacaggataagaaatgaggagcccatatcatggacagtacagcactaggtcaactggatttacggtggtgacgtgggcaggttgtttagacctagaattccaacttttacgtgctcacatttgtaattagtgtaagatcaacgtgtgttttgattcttattatgtgatgaacaattggcatatgtgattattggttttgatatttggagattatcgtcgaagtggttttggacaggtgatgaacaaggtttgttgttttgtcgggaccggtcagactgggcggaggttgccggtcagaccggcgctatgtgtgcggtcagaccggcccggcccgcggtctgaccggccgacgctgtgtcggtttcggtttcgggttgtttctttggatatccgtgcttgtttcatggttatggcttctagatggatactatacgtatgtaataccgttgtttgctaacaatgagtcaagttggggatagcttggtctcggaatatggtttctttatttgcttcatgtgtaggtgactcaatgcctcgggagagtatttgcggtgatggactgggagtcggtttggtggtaagacgatgtccgtggtggtcagatatcatgcgggatactaaggctagagttgatgcacgtggttgatggagattccatatggcatacgatggaggtattgtgtgtatatgggatgcggagtcaaatttggaaggagtccaaatttggtacgattggttatgttaagtttgtgtcttgtactagagggttttctaaggtgtttagaactcttagtatgagtttggttcgtggctttaggctgcctacctcatgtataaatagagggggagcgtgaggcttaccggtatcgcttttgtatcgctttggagagcgattgagttgctagtttagctagggttttgagtttagtcgagatttttgtaaggagtgctattgttgcactttgtaaacacaaagagaagcaataaagttgtcatcaactttgagagttcttcgatttgtgtttcaccaggtttcaacggtctaaccgatgactcaccggcggtcagaccggcggcaaggcggcggtcagaccggcggcgtaagggcggtccgaccgacggcggcgacaggcgcgacgagcgacttcggcggttcgaccgatcgatctacatcggtcagaccgacgttcttcaggcggtcagaccggtgcatctacttcggtcagaccgcgatccatcgatttgagggtaacttttatttccgctaaaagttttggttttgaggtatatcaaccattcaccccctctctggttggcttagttcttatgattcgatcctacaattagtggtttgcatgtgttcagataaaaaaaattcggccctagccacgccccctcttctttcccctcatccccaacagcaccgcctcttcccattgatctgggctcgctccatcaatagcagggatctaattcggtagcatggctcgatccagttcttcttgtccccctgtggtgaagattgccaggggaaagattaaaggtcccaaaaactgcacgattggggaagtcaacattgactacaatggtgagtataacttctcgctcctgacagtgttcattgtatgatgtgcagataccaggtcttcagctaactctgagaagttgagcacatgcatgtcctagctgctaaagtggaatcagtacacgcctatttattatttttttaatgatgtaattatgtctaaaaaacttgaagatctaaatctgaaatagtaagtttggactaaaaaagatcaacaagttctaaaacggggtgtttaaagccacttatgtatttgcaatttttttagtatgcagatttcatttaaggtcactgtaaaaagaacatgtcctacaaacatagaaagattttaagcaataaatattatagttgtacaacagaaaaatgtgttgatggctcaaattcattaatgataaacaattacccctccgtcaatacgaatgtgaaaaatgttagaatgacttacattgtaaaattgtgaaacggaggaagtacatgcacaattgaatttcatatatcatgttatactcatttcaaaatgcatatgacaacaaatgggtttcaaactagcagcaaaatggtttataagtggattgagatagtatttcattacttttgcacacaaacatataaaattcaaaaattaagtttccaaataaattccatgagtatttgattaattcgatagttgccaaaaaaaattagttgtgacaagttagctgctaaaaagttatagctgtgacaagttgtgataagaaaaatctagaattatatgcaagttggctgcttcagaagtcattgtattacatgatgtagataagtcagaaatttacacattcttttttcttggtattggtgttgaaccataccaatattgtcgaatttggctccttgagtacattcatctgcactggaattccttatcaaccattagtcactaagtgttcttccttgtcatactattgcctcaagtaaacaatctacggaaatttgtgtttaactagtcgggtgcccgtgcgttgctacggatcttgaataagtaatatgatatggtgtaacttgaaaatatataaacgtgtctgcattactgtaagtaagctagaaggcaatattatatttgaatagaaaaaagttactccgacgtctcccaggatgtcgatcaacaattacaagatataaattccaaaagaacaaatatgccatggatgtagactcataggtcctctttgggaccaattatagcaacggacagcttatgattactctaatatctgattatccccaaacaacaaaattattcataaatatctggccaaccaaacaagtcatcactttttttttttttgggggggggggggtctagtcattatgcactcatgccgtatattcaaatatagcaggtacatatttggacaactgcatataatccataatcaagataatcaaaagctttcataaaggtggccatatgcatagcattatcaatagttatgacatgccggatttgtgcagccatgccatcacctccacttgatcctcaccacgttgccagacctgcacgcgccaacaacagaagtaagaatgtcttcatcgagaatgtcatcacctgctgcttcagttgcttgaatgttgcttctgaatctgaaaattagcagcaaattcaaaagctttcagttttagaaagtggcaccatggcactcaagttcttggttcctttatcacaaaattggcaaattatctaccaccatctgtaccttcatatgcatccaccaagatgttatatgaagctctgtcacaatcacccctcaccaaatgctgcatcaaggagagatccctcaagcgccttgcagcaatcctgtatggctgtggtgcattgatatatacaatgtatattactccaaacttaaagaaaagtaaaaaattccatccagatgtcggtaggaacgtaggctcgtgtagccatggatttatgatgaccaccatttatcttccatgaggacatcataagcatacacttcggtctcgtggctagcctgttgcattcttcaaacacttcttcagtcttctcatactgactttcccttgcaaaatgcattcaccagggcagtctaagtgcagctggtaggattgcaccctactccatctcatttaagattactatcaacaacatcggttgctctgcatgtgaaataattaatcataattaagaaaaacatgtctaaatgtcttgaactattgaggccattaaagttatttttgaggcacccatctctatttcatcctttatcagatcaaataaaccaaatatggtacagcttaagatataaacctatattatattatattatatgaataactaacctgatcttgtcagcgatgttggtctagaggccccaaaattgctatccattggaaccctgtaatgcacaagttcaaaattttcagtgcagtccagtacaaaccataaggcgaaatcgaggaccacacttctagtgcattccaatttcatacagatgacagactctagtcatcaaaatatattgttttttcaatatatgttggagtacagaagtcaagagaaacacatggcgaaaagcatatgctgaaagggttacaaatcatgcattcctatctaccgaaagatgcaattgaaagcaagaacagacaagaacctctcaactcattcagttctagcttataaccaaaactttagagaaggatcattgtttgctgaaaaataattggttgcaccaaaagagcttatcttcctgcaatttgcagcacaatagcataataaaatatttttttactttattctacttggtgaaataatagcagtgccctgaatatttcgttagggctataacacctcaagattacagctttatatattgcagtgagttctgccgaacaaatgccctgcaagaggcttaatccatactacttgaaatacttttccctgttttcagtggcaaaagaacttttcctctatttgggtattggtaaatctgaagatatatcttggtgactgacagactggcagtcattccagaaacttggcttggctttaataagagctcaggttaggtaattcagaatatccaacaggagaaatacaggattgataagatctaaaatgtaagcacagtacagtaatacagggtaaattcaaacaaacttaagagcaccgaaataccccgatcagatcgaacaatttctactaagcttacataaaacaaaacaaaagaaaaaaaatcccaacctttggaatcattgtcaggaattcgaagaataattcacaactttttctgtctaatttaagtaaacaagaaacctttggaatttcagcacatatataatgattgaaacttgttcttgatgatgcaaattcagttatggagaaactgaaaaatgttaagaacataaagaataaccatatttaaccaacaagtgacaggaatttgtttgaccattgagaagacacaccttgcaaacaagatatatatcgctgcacaattaagcctccaaatgaacgtgcaattaattgaggtggcaaggagatctccttccaggtgaaatcagcaatatgacagcctatctgtatgaatcaccaaatgcaggcatctgttttttttttgttgtcaagttcttcgtcagaattaaaccgggttaaacttgacttcccattaaatttcgagtactgaagaactcatctgaacttttcagtaacctgctattcattgtggctgaaaagaaacgcaactacattttcaagcatgaggctctcccaatagcatgaggagttgtttttctgttagctgtgatgtaggggtgatatcaggtcagcacggtctgcacaaacttatcggtagcatgctgtgctcgattcaggtttgatttgggctctcttgtcgttttcacataggtattcttaattagttgtagatgtcatcaagctaaaaaaaattcgtgtgcatggcctatggaaagaagctcaaaatctttaatgaaaaatgattaagtagcagttttccgaaatctgaacctcaaaatgatttttttttgttggattgctgactcatgtttcagggtcggattgcttcttggttgaaaacttgaaatagcatgtacaagaaaccaacataacagtgggaaagcttatcaagatggagttaacgaggcagtaaagcgacatggcaagagattggaatggattggaagaagaagaagaggaggaggaggagatgggagaatttaccatgaaacaggtcttgccgatctagcaatcgccgagcaggctgaccttgaggctgcgtccttgacatccggcgccttgcggtcggcggcggcgccaccgtcgtccctggggagcagggacagaacggccccgttggctatgcgctgcggtggcgtcgaggaaactggggtgggggtatggggagtgggagcggcgacggcggcgaggaggcggggaatcgccgtgatgggatggaccacgaaggagagggagaaggcggcggcgtcgcgtggcagttggagtgttggacggaggcggtggcgtcgaggaaagtggcgccgtgggttggggggtgtggggcgacggacggaggaggcatggattccgctgcaggcggggcagggcggtcgccggtggcagggcgcgatggcgacggtcgtcggcggcagggcgatgcgcgacggagtgtgggcggagtgggcggcagacgcggagaaaaaggagtgggggaggcgccgctcgataagggcaaccacaatgtgcttaaaaagcaggtaataaacaataaatgcactcgtccaaccaggtaatagccattgtgggggcagataacagcaagaatcaggcagtagtgttactgccggcaagagacaaataaaatatagcatgtgtacagtgattttagagagttgcactaaaataatagagtagcagttagccgttacatttgtagcaattgtaacttgttgcaacaacgctacaacctcatccctctacaaatacaaacacaactcagtcattttctgtatttcatcaaataagatggatcctcccaacagaggttttatgcacatgcttagctagggctcccaaagccaaacttctggaaatggtagccaaaactccacttctccacagttcccctcaatattctcccaatcccagttttctcaatcctcaacacccacttttcagaacttccatccttttggggctccaaacaactatcaaccatatggcaattctactccaagcttccacggttttcagcagcaagcacattggttacactctacaccagtgagttttcaaggttttcgtcctccggaaaattgggtgtactcacctaatcaaattactgggtctgcttcttcccacggatcagaatcagcctctcagtgccctgcaagatatgaagagaacaatgtggttgatatcgaagagtcaagtgacaacagtcaagaggcagggaggagaggaacacgagtcaactggactgaagaggaaaacataagactccttagctcttggctgaataattcagtggatcctataaatggtaatgataagaaggcagaatactattggaaggctgtagctgtagagtttaatagcaatacatctagaagtaaccgcaaaaggacagttgtgcaatgcaagacacattggggtggtgttaagaaggaaattggaaaattttgtggagcttattctcgagctagaagcaccttcagtagtggatattctgatgatatgatcatggagaaagctcatattatgtttaagtcagaaaacaatgaaaaacctttcacattggagtatatgtggagagaactgaaagatcaaccaaaatggcgaagggtcttagaagaagatagtaagaataagaggactaagatctctgaatcaggtgcatacacatcatcgtccaaccaagacacggaggaggagaacagacgcaaaaaggagaacagacgcaaaaagaagcgccctgagggacagaaaaaagccaaagccaagttaaaagggagaggtaaaaatgtcgcaccttctcctttgggagaccagccatgtcaagactttgttctttacaatgaagctataaaagtgaaagcagaagcgatgctgaaatctgcagaagcaacatcgaaatcagctgaagcaaagaaggaatacacaagaatggagaagtatcagacatacttaaaattgttggacaaagacacttcaaattttagtgatgcaaaactgaagaggcatgaagctgtcctcgaaaagctagctacagaacttgctgaagaataaatgatcaccaagtgatgttgtatccctgttacttagtgtgccactatgtggtctatgatcaatttgctgctaggatttagacttagcaattattagacttgtgaactcagtgttaagtttgtaggctaagtaaatgttggattgtaaacttagtgaatgatggttgtatctttgtacctgtagaagatgttatgtactgataatatgtagcccacagtcttaattgaacttatttgaagttgttggcccataatttcttagcacttgatttaacagcagcctacaaaatacatatgtagcagcaataattagcacaattatttataatcttgctgttgtgatagtttaaaatagttgtaaagcaagacattgatgtttataaaactgttgtttcaatatataaaaagcaagacatggatgtttataaaactattgtttaaatatataaaaagcaagacatggctactaagaatctagctgttggaatacatccaaacagcaaggcatgcctgctgtgaatctagctgttggaatacatccaaacaacaagtcatgacatagttgtatggaatatagctgttggaaactagctgttggaacaaaagcaacactgagatgttagcacatatccattcagttgtatcttctatgaaacagggtatgcagttcagcaagatatataccattgcctttaattcagttcattctcaacaaagccacctagttcccacaaagatgtctagtgattcacaagtccattctagtcattctgatgagtccatcactagtgagaatttggaagatatgatgtgggaagaaattaatgatcctactgaagctcagctagaagcccggcttgaagctcaacttgagatgaaattgatggcacgcctagctgggaactctaatcagcgtggaggctacacacgcaggtacatcagtagagatcatgaagacgatcacaacaggttatttgctaaatatttttcagacaatcctttgtacaccgatgatcaattccgtaggagatttcgcatgaggaggcatctttttttgcacattgtacaagctcttggcgagtggtctccatatttttgtcttaggacagatgcatttggaaaggtgggtctttcaccatttcaaaaatgcactgctgccatgcgaatgttggcatatggtactccagctgatcttatggatgagacttttggggtagctgaaagcacagcaatggagtgtatgatcaattttgttcaaggtgtgaggcacatatttggtaaacaatatttacgtaggcctaccgaagaggatattcaacgcttacttcagtttggagaggcacatggatttcctggcatgttgggtagtgttgattgcatgcattgggaatggcaaaattgtccggttgcatggaagggacaattcacacgtggtgattatggggtacccactatcatgcttgaagcggttgcctcaaaagacttatggatttggcatgctttttttggtgccgctggttcaaataatgatattaatgtgttagaccaatccccattatttactgatgtcctacaaggaagagcacctcctgttcaatatactctcaatgagtcagattacaacatgggatactatctagctgatggtatctatccagagtgggcaacatttgccaaatcaatcatcagaccacagagcgctaagcataaattgtatgcacaacatcaggaatcagctagaaaagatgtggaaagagcctttggggttctacagaaacgttgggccataatacgtcacccggcaagagtttgggaaagagaagagctagcagatataatgtatagttgtattattttgcccaacatgatagttgaggatgagaaaggttcctatgacataccggatgacaaaacatatgaacaaggtcaattctctgctcagataacaggacttgaccacggaccaatatatggatttgcagaggtactagagaaaaacagggctattcgtgatcgatctacacatcggcgtctcaaggaagatttgatagagcacatctggcagaaatttggaggtcaaccacaacaagattagagtgtattaacttactatcaaccttgtactttactattttcatatcaaccttgtactgtaatattttcatgtcaacagatttggctcaattacttgtttttgcaatatacttgtattactttgcaatctaccagatttgtctcaaagcacttatcttaatatgtcacatattgaaccagaacaaacaagaaacaaataatcacacatgaacagtgaggcataaaatacatgcaagtgggtgaaagggggcttaccaaatggtctactttgcaatctacaccgatctttcagatccgatgcacatagcctccggatgaggactagaagccgaagccgacgcctcccatgacctattcagcctccacaacgatggcggaaatttggggggaagaacccgtcgatgcgcctgaggggtggggtgggggtggtaggggaggggagggggtagtggcggcgattaggacgacatcaagtcggagtcggccggaatcgatggcggctttgatggaaggattttggatcgggatcggaagagagttggatggagaggcgctccgggatagggagctgctcctccgccggcctaggctgctgggcattgaggcctcggaggccggcctgatgcggcggccgactgctccggatcaagcgatgcaagcagcggcgacgatggagtctctttctcttttttttttggataaggcagcgatggagtcgagactggggatcgcatcggccgcgggaggaactgagaaagtcacgggaggttgggggtagcgatttgttttattccgtgggccccatcttaattccttctctctattctcatacattgtgatggctaatttaactactactcactgacaaatggtcccacactaatacccacttccatattacacattgctgttgccctaagaatgcagagagaaggagagagaagcgcgtctgcctaatctgaaccgatggatttgacgattgaatggttcacattccgcgtgtctgctagagttggagtcatcgccaccactacactctttttaagtagtagagataattactttttgaggtcatatatagcaacaatagccgtggtaatatgaagcgttgaattgtctgtcatatcctaaactaaaaaggcgagtgggagggataccatgtttacatttgctagagtatgatatttatgaatgtgattacaggttggatctgtatactagactgcacacatgcttttgtgctacttatgatatgtttcagatttttgttgatgtacaattttcaatttttttttacattttctcttggtgtcaacatatatttatgatatgataatcttcagatttaaagaggcagagaatgattgcaataagcataatcacattggaaagcataagaaagcaatggatgatatattttgaccgtcattcttttcttttttatattaactgttgtatcgatggacacaaaaaactgaaaagtaatatgtttaatttgttgtcagcattaataaaaaaaaatcaaaagctctgtaagctgtattttgagatcaatatttatcctatactatctcacactgttatgtggatattccttttacctctttggcacatgtgacggtgcaagtaatcagagtcgcgcaacgcgcatgtggctagtgagtgtgatgtacgtgtgttgtggtgtgtatgtgtatatttttttatataatcataactaaaccaaaacatagcggtggcttgggttttagggacttcagattgttcaatcaggcactccttgcacgtcaggcttggaggctcatcgataatccagattcactgtgtggaagaattctcaaagcgaagtattatccatgtggtagtctcactgacactagctttacgggcaatgcttcgccaggctagaaagcaatcgagtacggcctggaactcctaaagaaggggattatctggagagtgggaaatgggggttctatccggttgtggcgggatccctggattcccaggaacatgtctcgccggccaatcacaatgaaaaggaacaatagattaaagtgggtttctgacatcctgaaaccggatggttcttgggacgagaacttggtttctgcaatcttcctcccggtggatgttgaagaaattgtaaagatcaagatatcctcccgccaagaggaggattttgttgtttggtttcctgatcggcttggtcgtttttcggtaagaagtgcttatcagttggcaatgcaaattgctcgacaggatgaatgctcgtgctcctcggactacgccatcaagaaagggtggaacctgatctggtcctgtaatgtgccccaaaaagtgaaaatctttggttggagagcagccacaaatagcttaccaactatggaaaacaagaagaagaggaattttggaattgttggacgtgtgcagtatttgtggccatgaacaggaagatgtgggtcatgcgttatacagatgccctcatgctaggagtatgtggcagtcgatggtgaaggaaaagcatatctcaagcctattttcagctggctgggcagggccagactggattttaaacatgcttcagttggtaccggacgatgaacaggcccttgtgctgatgatgctttagcgcatctggtacatccgcaacgaattaactcacggaaagccggcccctcctctagaggcctcgactcattttatcctgagttatgttcattccctagtggaaatcaagcagcatccttttgcaaatcttatgaaagggaagcatgttgtaaacctgaaggaatggggagcagagttaaggctaacagcatgtttggttcttaactaacattgccataactcactttagtcaatgttaggcaagtgtggcttgccacactttttgtggcctacaaattgtaagccacacttgtagtaaagttaggcaaaagattgagtctatgacatatagggtaagatagtaagaaagtgtggcttgccataactaaggtaatgaaccaaacacaaggctaaggaggtgtggcagcctaaagtgtgaagtgtggtgtggcaagttgaagcattgaaccaaacagcccctaaatgttcaactaacccacccagatggtcaaggccaaaaccgggatggatgaagcttaatattgatgggtcgtatggccctcaagatgggagaggaggtactggtgctgtcttgagagagagtttcggaagagtaatcttctccacgtgtggtttcattggcagatgcaatggggccctggaatcagagctgattgcttgcagagatggcctcaacctggcgttgcagtggaccctgcttccgattgccgttgaatctgattgtctggaaattattcagctgttgaattcaaaggagaagctgctgtcagccgaaggatttatagtcagggagattcgctttctcatgactggaacaaaggaagtgtcttttgccaaagtgcataggaaccaaaatagagttagtcactttttagcaaataaaggccgttgtgaatccatgatggaattctggccagacgataattgtaatatgatctcgcaccttgtgtgcgaggactcgtttattcgagtaaatcccttgttccccgcaaaaataaattaataatggttgcagtgtgaaagggcatgtagcctagtgattgcactgacctgagtatcgaatttcgaattgggttatttgagggctaagttaagttctctgtccgatgggctaagttcctaataattttaaaaaggctccatatatccggttagatgtagaggacgagtaaaaataccctcctctaaaaaaataaataaaattaataaaaaatagaaaattaataaaattaatattcagtcagcgaccagagcaatctaccaacaccagataaaaatgactaaatttgattttcatggaaaacagtttttaccctcctctaaaaaatatataaaaaaagaaaattaataaaaaaattcagtcagcgaccagagcaatctaccaacaccagataaaaataaaaatgactaaatttgatttttatggaaaacagtactatccacacttgtttactgacaatgataagatcagttcacaaaatatattttctaacagaacatgtaaaatcccttgcattattactattgtctaattttgttcgacaaatcgaaattaatgctgtataatatccttaatctgctcctgacacaatcataatttaaagggattcgatgagttcaggcagagatggggtggaaggcgacgacggagtgcttggcgatgtggaggctgaactgcccgcctttctcgctcacgtccagcttctccacgcccggcggcggcaccatctcgaagctcctcaccagcttcccgacgatgagcgccaggatgggcagcgccaggatgatccccgggcagctgcggcggcccacgccgaagggcaggaacctgaagtccaccttcccggcgacggtggcgtccacgccgctctccttctccaagaaccgctcaggccggaactcctcggggttctcccacagcgccgggttgttggccagccaccacgcgttcaccaccaccttggatcccttggggatggtgtacccgccgagcttggcctcctccaggttcatgtgcggcaccagcagcgggatcggggagtgcagccgcagcgtctccttgatcacggcctgcaggtaagtcagcttgtggatgctggactcggtgatgggctcgtcgtcgccgagcacgtcgttgatctcggcgcggaccttgctctgcaccgccgggtggttgacgacctcggccagcgcccactcgatggaccagagcgtcgtctcgatggcggccacgttgatgttctccacgatgtagatcacgttctccgccgtcagctcgccgttcttctccgcctcaaggatatggtcgatcgcgcaccggagcttgttcctgtctcccggagtgtccatcaccttcctgcatttcatatcaagatttttgttgattagacacgaacaaatttaccttgcaatcctcattttttccatgacaagaatggatagggaatgcagtaaagtaagaaaaatggaatgtaccttctcttctcgacgtagttgttgttgaagaaggcgagcctcctgctctggaggtcacggcacttgttgaggtagccccgcaagaagggacggaggatggggatgaagtcgccgtagttgtactcgaagctctgcgcgaggcggctgcgctcggagttgaacctggtggcctcgatgaacatggggtcgtccaccgactcgaaccgcgcgtcgaacatcatccggtacatgatgttgtacagcatgagctgcagcctgcgtcgcaccacgaagccggtgccctgcgccaccgcgtcgccgcgcacgtcgtccacgacggcgtccatctcggcctcccacatggccttgtactgctgcacgacgcgcgccgtgaagaacggcagcgtcatgacgcggcgcatgcgtcgccagtggtcgccgtactcggtgaacaccatgtcggcgccgttggcggtgaagatgtcgaagacgacgttgcgcgggcgggagccgaactccacgccctgcgtgtgcagcacctccgtcgccagcttcgggtccgacaccaccaccaggttgcgcacgcccagccgcagacggaacacgggcccgtaccgcgccgacatcgccgcgaggaacctgtggttcaggtcgttcccgacgtgcagccagttgccgaacaccggcacggccgccggccccggcggcgccttcccgtcgcccccgttcccgcccttcgcgcccaccgcaatgccggcaaacacagccaccggcagcagcaaggtgagagcaggatgctgcgcctgcaagaacgacttgacgaacaaatgcaccgccaacgacgccccggtggcgatggccaccctcaccacggaggctgccatgctctgcgttgtgttcgtgcgctccgcttgactgggaccgatgtcgtttgtgttttggtacaagtttagttggaaatctgtttgcttgggtacggtgtggtgtggcacgtcgatatatatagcccgtgtgtccgtgagtcgtgacatcgtgtggtgtactgctgtgcttgggttggttggcgtcatggcgtgtgggaattgggaaacggcaaggcagctgcgctgctgcgcacgagcggaggcggcaaaaggtggatggttttgggcggaaatctatgtgccgctaaggccagaaaactgggtaggcgaccgtgcgagtggagtggagtagcggaagtggccaaggcgtggtcaaactgtccgagctgacctaccacagcgagtctgaaatctgaaccttcccttcgctgtaggtacgatatggatatggaattctggagttctggagttcaggacacgacgcttggcacaatgccatacatgctagggtgtgtttcgttcacactaaaattaaaagtttggttaaaattgaaacgatgtgatagaaaaattaaaagtttgtgtgtaggaaagttttgatgtgatggaaaagttaaaagtttaaagaaaaagtttggagctaaactcgacatagatcctctactccatccagcttttcttgatttcgaacagagattaaacaggtgtgaaccaaaaactcgttaggatatagtacaagtgagaaattgacgttgactaccatggagaggactggaatttttggcggcgtcaacaactgactttcccaaaagcagagctcacctacaacgtggaatatttgaatttgccgaaaacgtttccaatggactgatggacaaatcgtatttcttcatttttttccttacctcactcataatcacgtaaatttcttcactttttgaagaaaatccaagaaaaacggtggactactagaacaatagaacaataagtattaagaacaagtaggaatttaaaatttactcccttccactattatatatgacgttggctagctaaatatgatactaaccaacgtcaaatattaaaggagagagatatactccctccatcccaaaatgtttgacgccgttgatttttttaaaaatgtttgaccgtttgtcttattcaaaaaatttaagtaattattaattcttttcctatcgtttgatttattgttaaatatacttttatggatagatatagttttacacagctcacaaaagtttttgaataagacgaacggtcaaacatgtttaaaaaaatcaacggcgttaaacatttagaaaaggagggagtagtatctaagatcaaacaagttagcccatttgtcatgaggacaacgtggtgtccttacgttccatgcccataaaacccaccacaggtatccttgccaaaaaagaaaaaagaaagaaagaagagaaaatccaagaaatgctattgacaagcatccaaatcctagaaatgccatcgacaagtgtgagttccaagaaatacgatcgtacaaacgactttgtcccaaaaatgctatcgccgttagggttctgtccattttgcgccgttaagttctataggatgaacagtgtttttaatgtcacaaaatggacggaaccctaacggtgatggtatttttaggataaaatcgtttgtatgatgacatttcttggaactcacacttgttgatagcatttctgggacttggacgcttgtcaatggcatttcttggattatcttaaaaaagaaagtttgcctacatggcttttggtaggaaaaaaaacttttaaatcttacaaaattctagaccattggatcgctttaagattcatgtaacgtattcaaaccctattgttttctcctttccttcctcggtcccgcccgtcgcctcctgcaccactactgccccacatcgccgtctagccgaacggggtccacggcgccatcaagccacctcccccccccccctctcttccctaaggcgacgacggtagcaagtgccccccaccatcttcttcgtgtcctgtgactcccctccaccaccaccggtcgccaccgcctaaccacaagctctgtttggccctcgcaaccaacgtcggcccgctgccatctcctccaacaccttggctccaacactggagtcctatccatgttcgccttccacggccatccctccaagcccgacgatctccttcctcttccctctgccctacccctatcctacccgggaccctaaaccctaactcatcgggccatcgtcggtcagcagagctggaggaaatggcatcgctggagatagggcagatagaaataaggtcgccagagtgtgaatcacgaagcaaattttatgattagaaatttgcaagattttggccctgatttcctatcaacaactatttagccattcaaaaaaaaaactgcacaaatatccttgaaagaaaaactccacaaatacactttactacaattttccgttgctcctcataaatgtttcaggacataaaattattgtatcacacgaacaaattaacaaatttgaattattatttgatatgccatggcacataataccagttcggtgtgcaactaatgattatatcctagaatatgcttcctagatatctaaagtaatgaaagaaagaatcattcttgacagcatattggaccacgtaatccgaaaaacaatggccatcgccccatcggatgaatgtttggataaaagatggccatccgatcatagaacatccatgcagtaaaagaaaatacatgcactaggcacttccctcctgtgtcttctagcgtctcccctttgacacatcgcaagcaacaagagtccaccgcatggaaaatacactatgggatattgatttgcatgggaaatgattacactatttgatctcgtgctgattaaatttgagaagtgaaataagtaaaacaaacatacatgaattggtgttgtgtaaaaaaacataaagatattgttgtagtggtatgtaatttatgggctacttcgcagtagtaatatttaggggcaagaaagcaaagccactataattgtaagagaaaaatcttaagatatttaacaaagatgcatctcttggtcgcgcaaatgcacgactttgtgtggctaatatgtaatggaaacctaaaaaatattgtaggatgtaaaaatagacgtataaattttgtacacgtcatatcaagtaaaacttttactcccaaattaaaccataagtaaaacttttagttaggatgacgtaaacaaatctcaaacatctatttttcatcctacaatagataaaaaaaatcaagaatgatgtcccatttagacaacaatttttgatctaagggttgtgtttaagaggaggagaaaagagaagatcgaaaaaatatgcaaaacgagttgaaccattaacgcatgattaattgagtattaattatttttaaattttaaaaatgaattaatacattttttaaagtaacttttctataaaacttcttttgaaaaagcacatcatttagcaatttagaaaacgtgcacatgaataacaagggggattttctcccaaatcactattgccgaacacaaccacggttttattcaaatagaagttactaaaggattttcaatttgaagttcttatggaaaaaacttctaaattattatatttttcaatccaaaatgcaattgatcttatgatgtattaattaattagttaattctaaattgtatttgatatgctctttccggtttattgagacctatatttagccgggctgcaaagaaaactaatatggaagagcaatgctcccgtcctgcgttttgtaccgcgtggtacttgtaccgcgtggtaccaaaacccatccagccgttgattttgtggcgggtaggattggaattggcgccggcgcaccgcaatcggtatctactccccaaatcagacgcgagacgcaaaccctagccgccttcagtatcgccccgacccaccgcccgcccaaatttcatcgctctgaatcgcgcctcactcacatcggcgcccgacggcggaagcaacatccggcccaattcacatcgccggaagcacttgccgcccctaatcacatcgccgccccaaatcacatcgccgccggaaggagccgccgcgccaaatcacatcgccgccggaaggagccgccgcgccaaatcacatctccgccgtagcagtcgccgttgtctgagtcgctggagcaatcttgttcatcgccagaaggtactgccgccgtttcagtattctgcaacggccgtgtgtttcctgttacaggtaaatcgatgtgtcgtaaattgtttgaagtgatactgtgtaatttgttttatatattgagattattgttatttttttggcagaatcatgatggttgatgagatggcagacaatttcagtagcttagaggaggaagaggagtatgctacgttcatggcaatgaggtttaagagcgagaacgacgggttcacgttctataacaggtatgcgaaagggaaaggatttagtataaggaaaaattttgctaggcgtgatcctgtgactgctgatgttatatttaggcagtacacttgctcaagagaagggtataggagagatgtttatatggatattggtaacaaaagcagagaacctagagcactaactcgttgtggatgcaaagctatatttgagattagacttgacaagaaacagggtgattggtttgtatgaagtttgtggcaaagcacagtcatagtttggctaaatctgatgaagttcctttccttcgttctcaccgaaatattagcattgctcagaaggcaaatgttgtggagttgagagaagttggtttgcgtcagcaccaagtgatggatgtcatggagaggcgtcatggtggttttgagtctactggttttgtgagtagggacctttataatttttttgtaagacagaagaagaaacagatattaggtggagatgcagatcatgttataaaatacatgcaagctaggcaaaaagatgacatggagtacttttttgagtatgagaccgatgaggctggtcgattgaaaaggttattctgggcagaccctcaatctcgtatagattatgatgcgtttggtgatgtagttgtttttgatagcacatatcgggtaaacaaatataacttgcctttcatcccattcgttggtgtgaatcaccatggttcgactgtcatttttgcgtgtgctattgtggctgatgagaaggttgcatcttatgagtggattctgaagcagtttttggattgcatgggtcagaaacatcccagaggtttgataacggatggagacaattctatgcgtagggcaatttcatctgtgatgccacattctgagcataggttgtgcacttggcatatagaatagaatatggcaagacatctccggcctgaaatgttggctgatttcagggcacttatccattctacttatggtccggaagagtttgagaataagtgggttgagttcaaggacaaacataaagtgggtgaagataatcaatggttggttagaatgtacaacttaaggaagaaatgggctgctgcttatttaaaaggtaagtactttctaggaatgaaaagcaaccagcatagtgaaagtttgaattcaaaacttcataagcatttggatcgtacaatgagtttagttgtattggttgagcattacgaacattgcgtgtcgcgtataagacatagggaggctgagctagattcaaaagcttcacaatcagtccccttcacgtgtacagatgcaagtttaattgagaaagaagtagcgcgcatatatacacctgcaattttcaagaaggttaagtttgagattattaaatccatggattgggaagtaatagattttattgatgaggatacagtagtgaagtatgtcatgtgcttgaaagagaacaatgagaagctgaagattttgaactgtacttatgaggaatcatttttgaagacaatgagttgcccttgcatgaaacttgattgtgaaagccttccatgtcagcacatgtttgcagttctgttttatttgaagatggatgccattcctgaaagttgcatagttcgcaggtggactgtgaaagccaaaagtgtctttccgtcggatagatatggtgagacattttcatggtcggaccaaatggaaaggtatcgcatgttgcgtagcttcggtagcgaagtactaatgaagtgctccatatctgaggaatgtacattgaaggtgatggagatgctagaaaagttggatttagaaactgaagattgtgatggtaacgaaatagagaggacactgtgtggtcacgtggtaggtcaaagtttacgtacagacattagtggccatgttttggtacatgatcccatggaggtagttccgaagggagcaccgcgaaaaagattgagaggttttttggagaagcgtgttaggcgttgtggctattgccgtaacggtggccataccattcgttcgtgtccaatttacgagaggtaatttatatgtgacaagtcaagctagttcaattggaaaaaatacctgcgtatttaattggttcacaatttttttcaggaaagtacgtgttgatgtgtgagaacgatggagttggccgtcaaattgcatcgttgaataagacaggaaaggaacatgtattttttgttagtttgtttatgttctgagatgaagcaacatggggtggaacttgatgaatatttgtggtgtatggcattgatgaatatatgtattaagaacttaatgtgagacgtactggcagtatgcaacttgcttttattattgatgttcagtctgtattggcattgctgtgcgttgtagaatgatatgctcttgtgtttgacttgtattttgggattgaaatgctgctcttgtgtctgttatgtgatttaagtctgttttgcttaagttacagcgaatcacgaattgctgtttattgcggctgccattgctgtgcagttcgaattgtacatttattgtgcagtgagcaatggaaggatacaaaaaaaacaaaaaaaacattcatttggtatgcccttgtcaagtacacatcgttttcataccagcatctactatgaaagcctccagcgtactgcaggccgtttggccctgcacaaatgaaccgacatagtaaccacaatagataataccaaaaaaaaaaaaactcaatcacctcaattgatagtctcggtaaaacaagcatactaaccacacttgatagtttcgcgccgcacactagcaaaaaacgatgaagggtctacttcctcttccatatgactctcggattctgtctcagtgtcactgtcggattttacctcttcatctatgttaacacaaatcaattgctcaattcacggtcatcaaaaaaatgttaacacaaatcgatggatgcaaaacattacccgtgtcactgtcgacttggataacaaccttcctgttgttcaccatagtcggctgcgtaggcgaggtcgggcagtcggaggggttgaagccacgtcggagtcggcggcgcagtcggcggggtcggagtcatcggcgtcgtcggcggggtcggaggggtcggcgtcgacggcgggatctgagggatcggagtcgtcggcgtcgtcggcggggtcggcggggtcggaggggtcggcgtcgacggcggggtctgaggggtcgacggcggggtcaggaccgtcggcgtggtcgtcggcgggggagtcgtcgtcggggtcgacggcggggtcggaggggtcgacggcggggtcggaggggtcggcgtcgacggcgggatcggaggtgtcggcggcggggtcggctggctcctcacatggtcggtcagatgggatgaaggttgtggatgggggaaaccctagagagtgtgccttttattgtctataaaatgggccaccttatgggcttcaataaacgggccactcaatgggcttttgtgacgtgataattagcaatgaaatagattgacacaaatttaaagccgcatcaacacacgtcatacatatttgaagcatcaacatccctgatacatattttcgataattttaaataaaagaaatgcaataacgactagggaacccataagccaagccttgaggtcttctgtttccttttttatcctggaaactctcttcttatgttttgcttcgattgccgagatctgtgaagccatctgaaattctaacttcattttgtcttcttcgactattgttctgtctacaaaatttgaccattggtactgcgccttggtagggttgcgtgtacttgcatggtccaatgcaagccagagcatctcaaatgccttttgtattcttggttgccattcttcgtcaacccaaaacaaagcgtcgcactggtcctcttcctccagtgggcaaccaagaaaccttcttccggtgtccttccattcccatgcagttcttctcttcgggcggaggccatgacgacatttcagctgggtaccggtttcatccccaaaatactcgccgtcgtcaatatacatgggaacttccaagcaaagtccagaacggtgaaactagcaaaaaatcaaatgaacagaacgagtcaactcgaagtaacggcgacgcttaaactaataatactaacgctacgaacgatttacacgatcggacataccttgtctttcatgttcgccaactggggatgcagctcaggcagaaagagaagagatggaatggtggagaacaggatgcatcagagaagaatggaagtagtatataaggacgcattgggactgttgctttcattgcttggcatttagtagtagttgcacattaaattaggcgtacacaaatacacatgcacggctgtcataaatcagtcatatacatgtacacaagtgcacacgactactccctccgtaaaaaaaaaaagactaaccagacattttccaagtcatacctgtgtgttcgtcttatgtgaattttttttataattcgtattttcattgttgttagatgataaaacatgattaatattccaatgagcgacaagttcagatgcgacaagtcacgtacgatcggacctaacagacaggtgtgactcgacacgttcagatgcgacaagtcacgtacgatcggacctaacagacaggtgtgactcgacacgttcagatgcgacaagtcacgtacgatcggacctaacacacaattgtgactcgacacgttcaaatgcgacaagtcgcgtacgatcggacctaacacacaggtgtgactcgacacgttcagatacgacaagtcacgtacgatcggacctaacagacaattgtgactcgacacgttcagatgcgacaagtcacgtacgatcggacctaacagacaggtgtgactcgacacgttcagatgctacaagtcacatacgatcggacctaacacacaggtgtgactcgacacgttcagatgcgacaagtcacgtacgatcggacctaacacacaggtgtgactcgacacgttcagatgcgacaagtcacgtacgatcggacctaacagacaggtgtgactcgacacgtttagatgctacaagtcacatacgatcggacctaacagacaggtgtgactcgacacgttcagatgcgacaagtcacgtacgatcggacctaacacacaggtgtgactcgacacgttcagatacgacaagtcacgtacgatcggacctaacacacaattgtgactcgacacgttcagatgcgacaagtcacgtacgatcggacctaacagacaggtgtgactcgacacgttcagatgtgacaagtcacgtacgatcggacctaacacacaggtgtgactcgacacgttcagatgcgacacgtacgagtgtgtgacacgttgtactggtgtgacacgttctactgtgtcccacatacacacctcacgtatgagtagtagacgagctacagatcacacattgagtaaaacggatcacatatggagtagtacacagcacggttggatggagggctcatcgtttgtcgtgtcgattgcattcacacaccaaccagatgaccatcatctaaccatgcgtgcagtagtacctatgcgtcactgtactgttgtgcattgggaatagcatttagtccttggtcagaacatcatatgaatgcacatatttattgctgtcagcacagtaaacgaagagatgaaaattactgcgtaacaaatagctgactgatggcatactttcactcctaatccccatataaattacagattatttacaaagaaagtacagtctgatctcttatcgcatcaacatcgccagagaaatggaagacgacgaagtcagaaatgaagcacagtttgaaccttcggtccagccgcgctttgatgaaatcacaactgaagcactggtcactgagcataaggttagcttcggtcattttttgtttattggccttatgtttccatacttctgaagctgttctatttttcatgaacttcatagcctgtcattatgaaagacatgactattgcatgttcaatacaaagatttctcgctgtagttgctaattttgacaagagtaagatatcacaaattgagaggattggatttggccggatgcttgccctgccagatatcacccttcaccgcaaactgattgggcaaattgctgagagatatgacagtaaaactgaaacaattaacatccaaggaacagcaataccaataacaacccatgatgtgaagtgtatcatggggttgcctgcggatggtatgattatcaagccaaagcctcacatgaatggagaagactacaaatattattcaatgtacaagcaacataaggggaagaacatttccctacatgagttggcaagacaaatcaatagtgcaaaacacccagatgagcactttcttagaagatttgtactattcaccattgggtacatcctatgccccaccaccaagccaatagttagttctcagtacctagcccttttgaaagacattgacaacattaagaacatcaactgggctagaatcacaagagattacttaatcaattgtctgaatgaattgaagggaggaaggagaaatctagaagggaatgtaccattgcttcaggtatgaaagtatccattacacgtctccatttgcaatccacattcagtgattcttgctctctttttttttcagttttgggcatgggaacatgtacacattaacgatccaatgtgcacactgacatacgttggaaggccaccgccgctaatggcctattggaatgaaatgaatgtaatgacatggctaaagtacgacaagaaatgtattcttgaaacagggactgtaagttacaactctttgcaacattaaatattagttttaacatgttaattacctactattatatactattcatattacattacaggttgtggttgtcatagatgatcctgaagagatcaaaggggacattgtcccagtacaatgtgaaggccaaattgacgaaaaaaaaattgatggtttcatggaagataacactgtggatgtcatacacatcgtacctgagcctgaagagatcaaaggggacaatgtgtcagaagactgtcaaggcgccactgccgaaaacaataatggtgatttcatcaaagacgacactcccaccaatgaagaaccggattatatgttcaaagcaactaaagaaagaacggctgcaaacggattcaactcacatggaagaggcgatgatgatgagagtccacaccatgtttacatagaagacgatgttaatgttccatcaagtcctgaaaatttcaaatatccagaggtaatagccaatgtatgaagtttaaacagttcaactcaaacctttattaaatctctctgttgaaggcatcaagtcctgaaaattacaaagatcctgaggtaatacccactgtatgaagtttaaactactcacctcaaacatttattaaatctctctgttgtaggcacatcaatcagccaatttcgatgcaattatgacacaactcatgcagattcaacaaggttgtcagtttctggacaacaagatatccacaaaactaatctcaatagagaatacttgcattcaaaatagaagagatattcaggtacagaaccaattttaacagttattgtactcataacaaattcaggtactaagttaatgatattgtacttgtactatttatgatttcgaacatgcataggcaataaagtacaggttgggtacaacttcaaggtcacgaactttccgtaaatttaaaccagcagccaaacaagaagagacagtaattgattccagggcagattgccgacaagacctagttgatgattcaaaggtaaggttgcaagcaaaatagtatattccaatgagcattacaaatgactaactaatcttgttgcatcttaacagaactacgatagtcaaccaaatggaacagctacttctccacacataatcgaaagcgatgacaatagccagcaaaatccaacactggtttttcaaataatagacctacatctacattacaaatgctacactgaccattatgctaattgcttgtacattgcagcagttatcaacaattggcggaaggcttagacgaccggagggaaggattatcaagccaacacacaagtcacaaactgatttcatctactacaaaaaaacatttccaaagccagttaaatctagtagggaaccgaaaccacatgatctaagcctgctggatgaagtaaccttgagttacatctctaagagtgaagacaaaaaattgctatcaacaattgcaggaatcaagatttttcgacagcatctgaaaccacttatcctaccaaaacaggctccatccaaagcaaagtggttgaacggcactgtaagcactgctatctcctgcttctaatttaaccaacaacagaataattaaacactcacaatatgcactgctattggacaggtcatagatgcatacatacaaatcatcatagacaagcaatccgacactccacgaggacagggaattgcactccttgaaactgcaacacaatgccagctgtggaaaattaatggtacagacaaaggtacatgcaacaagagatatcgtgatcaaagatctaaagttgctgccagctatttagagcatgaaatggtaatacatacatcgtatacattatatccataagtgaaaatgcatttcttactcatgattccgcatgtagattttcctacccttaaatagaaactcggcccactggtatgtagctgtcctggatggtgtcaatgaaaaaatccaaatactggactcactgcatatggataggacaagctatgatgcagaaaaaacccttaccactacggtataatgaaaacacatttcatacacttcccttctgaaagcactacaactaattatatttctttgcaatataacagatcaaaggaatagagaagtatcttcgttatgccaaacaagatgaacacaagacttataaatggaattctacgaacatcacgaaatggccaatatgcccgatgcaagtgcctcaacagaaggacgggtaaccatttctactatctgtaaataaaaattactatgatgtctaaatgtaacactataaacataattgaaaatttcagatggtcatgtggattgtttacgctcaagtgcattgaacactggaatggaaaagacctatcccccgagtacgatgcaatggcaagtattctctgctaagatctgctatgcgatctacgtgctgaagaagtatatcatgtctaatttttcctcgttttattatttcagcacacgacaactacttttagagctaaagtggccaccaccttgatcaattcaaccatgaatgaggtgattcaagtccaagaagacataatgcatctacacaaggaagaatctgaagaaatttgccacaaacaggagcaaaacatgtcaagtacttataattgatgataacaaattctctatttttatcttggtcaactcagtgatgtaaacgttctttcaaacagtttcagatatatgcagtactcaaacatattgacccttcattcaatcatgcatttttcattgcaaaccataaaccatcattttccattcaaacaacataccagtgtgatacaacttttttcttccaaacatcccaccacggtctgagacggcgaggacacacgatttggcaaaaccgatagcccaccacgagcgcactaccaacggccgatagatccgctagcagtgatgcaccgctccttgccgcgcggggccggcgacggcgtcgacggcggcgatttggcagcaccgatagcccaccaccagcgctctaccaaccgccgataggcccggcagcagcgatgcaccgctccttgccgcgcgcggggccggccacggcgtcgacggcggcgacgcgagtatccacggcctgtttgccctcgcatcgcgctcctccacgactaagtgaccgcgagcagaccaggcgcgcggggggctgtcgctcggggcgacggcggcgccgcgagcaccgcaagcctcggcgctcggggaggttactgctgggggaggcggcagccggaagccacggggctcgcggcgacggcagccggaagccgcggggctcgcgacgacggcggggaggtcagtgcagcaggcggcggcgcagtacaagggttagcggcggacaagtctctgcgatgcggatggagaccaattcgttagggcaacgatacaccactcatcgatccggatattgtgaaaagacaacgctacccttccaccctacgatttcaggcggtaccgcgcaaaggagaaatttggtaccgcgcggtaccgtgcattcctgaccgttagatctgtttacatccaacggctgcgatttggtaccaccttggtaccacgcggtacctcgcgacggtgctggacggtaaaaaccgtaaatatggaattatgaatatgcctttttacgctatttcaataatatgatttagtagaacgatgttaaaagaaaactacttagtttgttttgagatcaacaaatttcaacatcatttcagaggggaagaagtcaagcttacacattctacgtataataagcgtacaaatcacattatagctgtacgtatataggaatagcttgaaccttgaaatctagccggccgcctgggttggaaatggatccaaagtgcccgattaggcatgcagtgcattaggactaatctaaagtgccccatttgcatcaagtaaagtactatattaactacagtaaaatcgcacaccgttgtatgcatttgatcactgtagcacagacatcgccgcgaggaaccctttcacagaaactgttcgaatttaaatgttacaatgatgtacttatgcgtcaggttattcaaatgactttgaactaatcacgtggtaaagcagtatctcatctccaagacagtggtcaacaatcccaacaaacgctctctctcagaaaacaaaaaagacccaaccaacggttgaacgcacaatgagaatgtgagggaattgtaatccaacaccgaagctcacacaggtcgctggcctcccaccaccaccaaacccaaccccggaactaagcctccatcctggccgtccatcggccatccagacgctcctatcgcgccacaccaaccccaccaccgctttgcccccgtgaccaggtcagagcggcggactagcccaacgagacgatacgacttgtcaatttgcccatgcggccgtgcccaccaaccagccagcacaacagagagcacgagcgcgcggcgcatccacgtctctcctccattccgccgaggccgagcagccgatggatcgcggcccgccaaccctgtttccttccgtggcacacgggtttccgcgcgaaaccggcgaaattcgccgcatctcttcgtgctgagccgtttcccacgtactgactcactactacttgctactgccacccacaccaaccaatccattgacgctatataagcacgccacggccaacggcacccgacccagcagccacagctcgctttgcaattccaccaactaaaatcaaaccaccaaaacacaacacagggacgtatcgcacagccagtgagcgggtctagttcgagcagcatggcggcctccgcgatgagggtggccatcgccaccggggcgtcgttggcggtgcatttgttcgtcaagtcgttcgtgcaggcgcagcatcctgctctcaccttgctgctgccagtggctgtgtttgtcggcattgcggtgggcgcgaagggcgggagcggtggtgacgggaaggcgccgccggggccggcggccgtgccggtgttcggcaactggctgcaggtgggcaacgacctgaaccaccggttcctcgcggcgatgtcggcacggtacggtcccgtgttccgtctgcggctgggcgtgcgcaacctggtggtggtgtcggacccgaagctggcgacggaggtgctgcacacgcagggcgtggagttcggctcccgcccgcgcaacgtcgtcttcgacatcttcaccgccaacggcgccgacatggtgttcaccgagtacggcgaccactggcgacgcatgcgccgcgtcatgacgctgccgttcttcacggcgcgcgtcgtgcagcagtacaaggccatgtgggaggccgagatggacgccgtcgtggacgacgtgcgcggcgacgcggtggcgcagggcaccggcttcgtggtgcgacgcaggctgcagctcatgctgtacaacatcatgtaccggatgatgttcgacgcgcggttcgagtcggtggacgaccccatgttcatcgaggccaccaggttcaactccgagcgcagccgcctcgcgcagagcttcgagtacaactacggcgacttcatccccatcctccgtcccttcttgcggggctacctcaacaagtgccgtgacctccagagcaggaggctcgccttcttcaacaacaactacgtcgagaagagaaggtacattccatttttcttactttactgcattccctatccattcttgtcatggaaaaaatgaggattgcaaggtaaatttgttcgtgtctaatcaacaaaaatcttgatatgaaatgcaggaaggtgatggacactccgggagacaggaacaagctccggtgcgcgatcgaccatatccttgaggcggagaagaacggcgagctgacggcggagaacgtgatctacatcgtggagaacatcaacgtggccgccatcgagacgacgctctggtccatcgagtgggcgctggccgaggtcgtcaaccacccggcggtgcagagcaaggtccgcgccgagatcaacgacgtgctcggcgacgacgagcccatcaccgagtccagcatccacaagctgacttacctgcaggccgtgatcaaggagacgctgcggctgcactccccgatcccgctgctggtgccgcacatgaacctggaggaggccaagctcggcgggtacaccatccccaagggatccaaggtggtggtgaacgcgtggtggctggccaacaacccggcgctgtgggagaaccccgaggagttccggcctgagcggttcttggagaaggagagcggcgtggacgccaccgtcgccgggaaggtggacttcaggttcctgcccttcggcgtgggccgccgcagctgcccggggatcatcctggcgctgcccatcctggcgctcatcgtcgggaagctggtgaggagcttcgagatggtgccgccgccgggcgtggagaagctggacgtgagcgagaaaggcgggcagttcagcctccacatcgccaagcactccgtcgtcgccttccaccccatctctgcctgaactcatcgaatccctttgaatcaagttcgtgccatcagtcgataaatccaattaaaatttttgtttgtttataaaattgcagaagaataggttataaatgacagcttacagcatgttttcagttttgtttcctaaagagtgtaatttgaaaagtgaaatggaattgtcatccaactagtgtgagaaagtgctctgctttgcgtaaaaagaaatgtgctctgctctgctctgttctgttatctcttcctttgtagtctgactgtatgttcagaacattatccattttcctgtgttgcggtcttgcggatgcccgtgcgaagaagagcaaaggtcatcttcttcaatcttcatcaccggcatatcgctggcacagccgacgctgattagttcggcatgtattccttttgcgaccttggaggcttggatggattactgggcgccagaatggccatccaatcgatggaaaggtcattatgagacggcctataatataagctcactacttactaatataaatcaatgttagagataatatgattggctataatgttagttttatttttgtcatcctctctttctctcaccataaatttatactagctcttgtattagagccaatactttctgcttttctttacctctctctcttccattattatcctttctctaagatcggagaatacagatgactgacggtgatggtcctgagtcagtttttgttagagattacctattgatctttcgagtttttttataggcagtgtcgcagtgattaccaacggtagcaatgtttcatatgccccttcatattctcagcgtaactatgcccataagaaaatgaaaggactgttttttttttctttgttgccctaccaatattttgattgcttaaagtggtaggcatgatggttttggttttaagccaaatgattgatattaccaatatccaatttggtactttctagattttaattaatttctttctaaataggaaggtaacccgcgcattcgtgtaggtatgcgtattagtttgtttcgagaataggtttaagaatggaagctcaaattaaaagtgaggtgattttcttttctaaatgaatattcgttgtctctgttttttctaaatgaatattcgtttagaaaagaaagaaactttcgttgataaagccttcacctctttgatatgtaaaagcaaagtactgtagaggcactagtaatagtgaaaagtacggacaatttttttttgaaattttattagattttctctaattggttaactttacttcctattaatattttctattttatgtgtatacactcttattctaagttcaattttcgcgtgatgataaataggatagagtataacaccttatgtataaacctttttcaggaaaaaaaaatcaatcacccttatgtataagagcaggtacaatagcaggctataagccggctataaccatatatcgagaagaaaagaaaagagagagaagaaagcgggctacaaatttgtagctggttgcaacacggactccaagatgttatatgtgtatgagaggtgggaccgggtattaatggtgtagtatatttttatagttaactattgtatgaatgagctattagattggctatagatgttttggagccagtagttggctatactattgaccttgctctaagctgctaagactggttcggtatatgttctcattgtttactcatcaacgtattgggtggtacttgaggctgccttaaatgcatggggttatagagtcttaagagcaaggctaataatacaaccaacttgttggctgtaaggtttttttagccttctctcagtccattcatataatagttagctttttacaattaatacagggctcacttgtctatcttacagagtttcttggctcttgtgtccaagccgtctgtaagtttataagtttatagcccgcttctcccctctctctcctctcttctatcctccgcatcagtatttagtcggcttacagcctcctattgtacttgctctaaggttccgttcttttctccaacaacagttggatgaagataaatattttttggcacgcttttcaaactgctaaacggtgtgtttcgtgcaaaaattttttatatgaaagttgctctaaaatatcatattaatctatttttcaagtttgtaataattaaaactcaatcaatcatacgttaatactacctcgttttgcgtaaaaaaaaacttaattttcatcttcaggagaatttgcgggaaccgtgttggcgtaaaaaacgttgtgtgggagataacccattagagtatcaccaacacagttcccacaaattctaattcaaaattttcttttaggaatctctaatatggatttaggatttttttttaaaaaaaacatacctccaacagattgcccagaactaactcccgaaaacaaaaaaaaagtgagctcacctcgaactcttcttcatatgattggccccccttcccgtgcatgatcggcgctccccctcctatccacgcgatccatcgattgggagtggttgcgtgttctcgacttgtggatagccaaaaaaaaacagatatgagattttcaaattttaggcaattgatcagatggattgttggagcatgattttcatctgaaatcctataattgttaggatatgtttatgagaactattggtgatgctcttagggaatgtttcgtgtggtgtcaggctccatacaaaccagcgacaacaacttcgcatgcatttgatatttcttctgtaatatttttctataaaaattatagttttaatattagaaatttctagatataactgcacacatttatattatataatctttgatgtatattctgctatgcctatctgggtgaatactgctagttttctatggggaggtggggaggtaggtgagtgaagtgcggcaagatcatcggcacggcaccttcctaggccagcgacaggattcatgtagtggcaactgcggaggaggagacggggagatttaggaagaggagaggggacccacccatctgcgctcctcagcaaatggcgctgtgcttgaaccgcaagggagagaagagggtaaagagaggggtgatggcgtgggtcccactgtatcttttttatttttaactggacaatcactgacatgtgggtcctatgtttatgttttttttttactttaagcgctatgtgaacaccacgtagacaccatgtcagtcgaaaccatagtccaaacttccttgggaccttgtttgcactggttttgtgagttgagggacgtgttatatctggtattgtggtttagagacgaattttagactcggtgacaactagaggaccttcagtgaacttattccaattttgggactgctatgtgtccaaagtgttcgtgaggcccatgtagtattctatctaaaaaggtgcggcccatgtatcccccccagctcggcatagacttccgtcgtctcctcctcgtgagctcgcccctgcgccgcctgcgccgatctccatcccgcgagcgagcaggggcgcccggcgctggcgccgtcgttcgtcctgttgcttccgcccgcatcctggtgagcatccatccgttaccctacgcgcaccctcttcctcatctctctctggtctcttcccacgcacttcttctcgaatttgcgttgaaccctatagattctgttctagaaatttgccttaatctgaataactagtaacagtttgtttgttcccccaagtagtttggggcttcaattgaacccccttgtcggtcccacgctagatccgctcctgctagtgtctgaattgttcatcttgtttttagtacagaattaccagttcttaccccattttttgtgctaattttcgcatcggaacagaaaccctttcgtttgtcaaactctctattgttgttttaatagatgcccctaactatcaaggataatagtatctgtggaataatgggattaattatttctggcacaccatttactctctctctgtctctctctaaatttcacctggcatagcagcatgccagcataatgcattttttcacctttctcttgaatactgttttctctttacggattaaggaaaacattattgtacagacagtgctcgtttcagaataaatgggagatagggaaagacgaactgtgtttgtcacagtagggaccacgtgttttgatgctcttgtcaaggcagtagattccccgcaagtcaaagaagctctactggaaaaaggttatactgatctaataattcaaatgggccgaggtacatatgttccatctaaggtcaatgaatttctctttcattccttttaaattgccactttaccagcacggaattccagcttgttctgcatgttaattcttcttttggtgctttttttttgtctgtgtgcgtgttctgttcttggggttaattcttgatgagttgtcagatgaacagaagttgcgcggtttgatttcttgtgaagagttctgtttggattgcacatttcttattttcagttttatataaccagtttcgagtgaatgtttctaagttgaatgggtagggactatatccaatcattgaatgattaggggatgttcctaacatgtggcatgaatttatgttatattagcagataataattgctttactctgctagtgattcctctgttctacctgaaacatttgtaagcaccatgttgatggttgtgaaagtgaagtgaaaccagccagaaactttgatatatttgaatacaggtctcaggagatggaactcttcaagttgattatttcactttttcgccaagcattgctgattatataagggatgcttccctggtcatcagtcatgcaggtaattgtacatgtttataggacataccaggtgaaatgtatttcattcaaataacatttttacccaatataatggttttctcaattgaaggattactccactgcaccatgaatatgctctcattgtttataggtcataccttgtgtaaagtctgtcttcatggccaattctattctgttggacatgaggagtgtacacccttaccgtataagcttatatacaaaactgggtttaaagatcttcatgccaatagtttgaacttgattaaggcatatgctatctcatttttttcttaagtgctgcagtggagtattatatcgtgtggaacgctttggtgcattacatgaaatcctttctaaacttggtagtttgtgccaacaaattgagcataattggtgtctttaaatggctgacgcctgaagagaatagctacacttgtactgttttaacgccatattggctgctcgatttttatttacaaaacatcttctgatattataagcacttttttgttaaccaatttatgttttttcacctctagatcatactgctatttgagttcatttgaactaataaacatgccatttttacttcgcttcacaatatttatctgacgcgtacaaagaagcataatatttaagtaagctgaccatacttgctattgttaggtagagttgtaatatttctacctgccgttatggtcaaatttcattaaatgttacataaattctgtgctgccttgatatgtgctctggataaatactgtgaattttagcaagtatatcatcaattttgcatctttgttacttcctccatttcataatgtaagactttctagcattgcccacattcatatgtttctagattcattaacatccataaaaatgtgggcaatgctagaaagtcttacattatgaaactgagggagtagttgtcaatgctgattgcaattaaccagattgagctctagcaggttcaggaagcatattcgagacgttgcgacatggcaaacctctaattgttgttgtaaatgaggatttgatggacaatcatcagagtgagttagcagaggaactggctacaaggaaacacctcttctgtgcaagcccacaaacactaggagagacgatccaggaaatggacatagagactctcaacccttatgtgccaggggatgccaaaccagttgtatcgctgattaacaagttttttggcttcccagatgactgattttttttttcttattcccgccttttctgttgtaagaaaatgaagtcacatatggaagaggtagctgacaaaagtgaagtttcatagtggcatgtcacatgcaagcctatacccaaccattttggtatgattccaactcaccaagtgtaatccgagagaactctttgaattgtttgaaaacggaggaaatgcatcttaaactccattgttaagccattgggtgcgaagtagtatgatttttttttatttgaaactaagtagtatgatgtttattccgggacaatctcttttgctttctcctttatggtatagtttagaagcaattagaatcagacggctggtgacacatggaagctgtatcgaaaggctaaaatcttcaggtattttttattttattttaggctttgattttagtatgatgccaacagggactctcctagaggtagttttgattttctttttaagcttttgttttagaattagttccattgtctttctccttttgtcttggtgtctggctctttttcatgatcactaggagaacaattcaaagactagctaatattattcttaaaaatcaaactttaaaaattcaaaatcgctttgaattatgggtttgtttggttttttttttaaaaaaagagaaaacttagcaaactttggttccgtagaagatgtttgggtagtgttcggtttaagacctttatagcttttgttgagttttgagagtggaaagttttggaattaccatttttttcgaagagttgtgatgggtgtgtttgccaagggtacaaaggtatgccatatagagtcgaagttacccattgaggaaggccttgattctgctagggatgcaccacagcacgaacttttgcaatctaacctatcaaatactcacactagctgtgcttatatgaaaaatagaccgaaagcagggagatgtgaaattttgcacgatacaaagctattcatacgtgtgtgtgtgtgttttgggtctgaatgcattcatactactacctccgtcccaaaataagtgcagccgtgaaaatccgtgtccaacgtttgaccgttcgttttatttaaaaaatttataaaatatttttaaaaattagtcatacataaagtataattcatgttttatcatctaatagtaataaaaatagtaattattttgagatggacgaacggtcgaacgttgaagatgaatagtacaaaactacacttattttggaacgggggagtagataataaggcgtgcttcgcgcgccctaccatcaggcaaacaacaaaaagaaaaaaaaaagtcatgatgacagtaaacgcacgggcaaaaaaaagaagtcatgatgacagtaaacgcacgggctacaacctaattattgcaacaaattaaaatgccaatgccgtgcatctgacatgataagaaatgaggagatggactcaaaaaaacagtgatgagtcttaagattggtctaacattactgagcgaaacctaagaaggtatcatggagctaaatacatatcagaaatgcatcataattcatcgattcacgtcaccgaacatcactccattgaatagggtatatacgttatttaattatatgtgaatacccaaggtatatcaataatatggaagtgtcatatttatatatcacagtcaaacagtcgtatcttagggcttatttggtttgaagccaatttttaccctaccaaaatcttggtagtgccaaaaccttgacaagttttagcactaccaaattgagtagtattgaatttgaactattgtggtaaaattttggtagcataccaaatatgcatatgctactattcaagttaccaagaatttggtaaggcaataagttggtatcaaaccaaacaagcccttaataacctatttccaccaaaagttttaaccaccaaattatctgaaaaaaagaagcatttgttagataatgaagcatctttaacacattgtatgaataaggacattttgtgctaaaaccacttcagcaataaatacacaaagatttggtaagtattttcatacattgtgaataaggacattgtaatgcacattttttttatggcacagatcatatcagatacacaaacatgaaataaactgggaagttagtacatatgaaaaggcgggggggggggggacttaattaatatctcaactatgggcataccttagcattcttatagcctactcagctgatgctttgcacagaaatgcaatttatagccagtttaatactttaatcatgaaaattgccaagaactgaactacattcaaatttagtcagaatatggatgattaatcaaacatatacacgacacatctgtagttttgttttcttgcggtcggaccaataccactacaatggcagatctatgtgagaactatttcctccgtttcacaatgtaagactttctagcattgtccacattcattaagatgttaatgaatctagacaaatgtatgtgtttagattcattaacatttatatgtatgtgagcaatgctagaaagtcttacattgtgaaacggagggagtaccctacaataaaatttaacaccaaatacccatacagatatatgtgccttctacaatagaatctgtaaagcagatgtctcctcttttttttttttgcatataacttgaaatcacaataaattgatcagctggatagctgcacattgagccaagaacacaataaaagtaactcttacatcttaaataactaaagtatctaaatctagaatctcttaagcaaagctcttctctggatgtttttttagctacattgcacaacagaagcatagagcaaaatagatcaggatggggagccaaagaacacaattattaaagtaaaatagttcaaagccagggaccacatatctcatacccaaccaatgcatatcagtaggccatgcatatctagttgataacttcaagatagtttcatactctgtgctcataggaagaataacaaacaccttaaaggcaaggtaaccaacacacaactatactctatactatgctcatccaaaggtggctttcatgaaaagaaatagaaatcattgtttactcttctgtgcattacctctgcaatattaccccctgccacactgcatagtaagccaagcacctgctaatatgtttgacctcacaacaatctattcgctgctaataatgtacctatttgatatccaagaaacaataactactaaataatatcgtatgcagagataaatcaaaatcagtagattattacttgtttggtgtttaaatgttacagcaaacagcacagcagtggtaggcagccaatctctagttgctccagtcatatggccatgtcttctacagcagcacaaggccaagccagaacggtagattgccctgattgacattaattccattacaagctccccgggacagcaaccggtggccagatccgttgtcttcgatggcaagaacgatgtcaacatgaaaagcaacagcaacagctagaacacgggtgaagcattgcagagtgtggagattatgggtaccccatacccacacggcatggttatccgacaggttataggggataacttatatctatggaatatgtaacgaatcatgacttgggtattacgtttccttgtatattatggaacggcctaaagtcctggtttgataatattgtaaagtagattaggaaaccgataccgtattggttaaggtttctatcttgtaatcctgccccccaccatatataaggtgggcaggaggccctctagggggcatgagacacaactagatcgtcagatctatactacacccggcggattcaaatccctaaacaggagtaggttattacctctcattgagagggcctgaacctgtctaaatccttgtctctgcatccatccacttttaggtctcgtgcgctacccccttttattattgccgaattcatgtttcgacagttggcgcgccaggtagggctacgccgagttatctgtcaagaagtgtgatggaatcaacctgagtcgctggcatcatcctccctcgagtttcatggattatgccgtcattgatgcaatcttctgatcaaatcgatatcgggtttgccgtttcaatctaaccaatgttattgttagattaactttcaattacagattgaccccctggtattcaccccaagcctctcacttcgggagtttcaatttcctcgtccacgagtttggaattttatgcttctgtaattcagatgcaaaatcagtcgggaaggcttaagacttctttcatctcgttggatcgccgccatgtttaccggttttattgaagaaagttggcatgttgtgttcatcatctggttcaatctgttcggcgatatcaatgcaacagatcaattctcatccgccagcttttttttaagaagatgtgaaatttcctagcgatactcaattactaatccaaatcggagtcagcctgaacttggagccaatcgatcagagcggtcgtcgccgagttatttccttgatcagcaatactcgaagacattaatcatgcaagtgtatgtttccatctgatacatgtgcaagcaaacgtgcatggcaatttggtcaatcaatcaggagctgccacgtcatcagcaaccaggaaaggaatttgattagtcaaatgatttatctatctaagatgcatacatgcattgagtcgaccaggggacctccaccgcatcagatcgccgccagtcgcctccatctcacgtgcatgcatcaacaatcacacatgcataactctccgagcgtcggtcacggccgccggacttttgccgtttttgtttgccataatgatctgcacctaccatggcctcgacgacgcgcacacacaggcggagtttttgctctctttggtggtttcatctttgttcagatcaattgggccaaacccgatgccatgcaatttttttaggaacaatgcaatacatcaagccatgtacagtatgttcatctatatattcggcatggctgcctattcatgttggctgtcagctagggcacctcgccgggatcagtcttcaccgatggccgcggctgccttcgccgccaccgactggtgtttccgcctgcaaggctggcctattatgccgccgttgattggcgtctatgtcttcaccgaccggccgcctcgttcgccgccgactggtgttctcgcctacacggttggttggtcacaccaccgtcgttgggcgtctacaacttcaccattggcccactttcgccaccaccgactggtgttctcacgtatacggatggtggactccgcctccgttgatgggcgtcatcgtcatcttcaccgatcgaccgccacgtctgccgctaactggtgctttcgccttcatagttggcctgttatgccgctattgatgggcgtctatgtcttcaccgccggcttgcttccgtcgctgactagtgttttcgcctatacggttggtggactccgccgccgttgatgggcctcgtcatctacaccggcttgccttcgtcgccgccgactggtgtcttcattgttattgatggacgactttgttcccacattggtcacctctgccatcaccaacgggaatattacaaagataagtcatcatttatttcattctttacatgatattttccttttcctctgcctcactatgtcaactggttcgccgttgactagtgagtcggggctacatatgttataccatattttttaaacaatttttataatatttatcttgattgcttgcaatataatctgagtacaaaagtgcctatcgagttatggagttctatcttcctatgctttccatttggtttgccgatggatagttgcctttgggccgattcctatcacccgggggctcgttggatggaccgagtaacgcaaggtgctaagtattattcggaataaatcaaaagcatagagataagataaatttattttctgctcttaacaattgcaaaagtacccgagtagtaaattctgattcgtgaaactttgttccattaatgacgaactcatgtcactcatatgcatgttttggaagtgcttaggccgactcccggtgcttgggggctatgactagtcgggcagagtgtttaaacgtaaggagtcattcgctcggggaaatcaaaattaacaagaggagaaatacatatttataaacattttaaaatacttgaattttcctcgagtattatatttatatcagatactactcatcctatatgtttgttctgcaggatccagatccaaatatgcataaaagggattcatggctttaagcttatctcttacgctctaggaatggatcagtcagaacatcaccaccggcttgccgtcgtcgccgccgactggtgtcttcgcctatatggttggttggtcacaccaccgttgttaggcgtctacatcttcaccgccggcttgtcttcaccgccgtcgactgttgtcaccgcctacacggctggcctattatgccgccgttgttgggcatctacatcttcaccgccggcttgccttcgccgccaccgactagtgtcttcgcctacacgactagcctattatgccgccgttattgggcatctacgtcttcaccgaccggcttgccttcaccgccgccgactggtgtcttcgcctgcacggttggcctattatgccgccgttgttgggcatctacgtcttcaccgaccggcttgtcttcgccgccgccgactggtgtcaccgcctgcacggctggcctattatgccgccgttgttgggcatctatgccttcaccgaccggcttgcctttaccgctgccgactgctgtcttcgcctgcacggctggcctattatgccaccgttgttgggcgtctacgtcttcactgaccggctcgccttcaccgccgccgactggtgtctccgcctgcaaggctggtctattatgccgccgttgttggacgtccacatcatcactgaccggccgccttgtatgacgccaactggtgctatcgccttcacggctggccgcgtcgccgccaccgctaataggcgtcatcatcttcaacacaagctgtctacatctgctaccgactggattcttcacttccatggctgcatgattctgatactgttgattggccttatcatcttcaccgccggtcatgtcgtctgctgttgactggtgtcctcgcctctacgactggtttatgctgctaccactactgatggacgtcatcgtcttcattgctggccaccttgtctgacgctgactggcttgttcgcctccacggctgcgtgtcttcatcaacattgactggtgtcatcgtcatcgccggtttgcctttgccaccgcccatggtgtcttcactttcatggttggcctattttgctgccattcaaggacgtcttcgttttcgtcatcattctacttcttccatcgccgactggttatgccgccgccgactaatgtttttatcttcacaattacgcatcttcgctaccggtttgcttctgttgccgccgactcgtgttcacttcatcacggctatgcaactttgtcgtcatggtggagcgacttcatttttattatcttcggcaccagcaaactctattgcctctacttcgcaagctttgctacttcacaaaccacgacgactacaagagcctcgacatctcggcatgcaccactagatttgatgccgtgttattttactacaacaactggtgtttcaatattcaagatttctactcggacatcctcaacacatatcttcactcaagcaatgactactcgatgacaagaagctatagttctcgactctatgttcagttgtttcccaactaatcaaagagttgggggctacacaagactctcaaaattgccgggtcattatatggcatatgtggtgtaaaatccgagtaaataaactcataaaggatttacaactccaggagtcattatcttcgtttttgcttcggagcagacgttctacttcaattatttcactgacaattttggatgctccatactgccacaatctacttcaaatttctcaagtatcaagtttgagatttaatctacatattcgggaggttggagttatcaaccaattaactcatattcaacaagttggacaacaacatctactctcttccaagtgaagcatctgcaacagatataacactaagttctgtagtcatcttcgtaaatcaaggggcattgcatcatctttgttatgcacacgctcgcatcaaggaaactactcgagttttgatatcttctcaacagtttgatggattattgtcactgacatcatcaccagcacctctgcttcatcggctctgtcatctccattgttgctaatggatgattatgtctttgccgacttattatttcaccttcacggctgacctactacgtaaacgttgatgagtgtctttcgtcattatcatcggctgctacacagctattgactggatcaccgacatcgtcatcttcatcaacatcatgtcaagcctcttcaacatagcttattctactgctattgatgggcaacttcgtcatcatattcgatcatctctgttgctgctaatcatcattatcatcggttgcgttttctgtcgctgactattttcttcatcttcatgattgatggatttcgccattgccattgatgagcgtctacgtcttcaccaccggcttgcctccgcccatgatgtcttcgctttcacggatggcttattatgcctctactaatgggcgtctttgtcttcttcaccgggcacctcgtttgttatcgactgattatttcactgccatggctgcacaactctgtcgttgggcgctttcatcttcaatgctggctgacctgactgctgccgactggtttcttcgcctctacggctgtgcaacttcatcacttttgattggtatcactatcttcactactaccaatatttttgccacctctggtgggcaatattatctctatattggtcatcttgtctctatgcccactacgtcagctaccatcaatggacaattgtgactacgacagaaggacaagctatatgcttagggacttactagctcaaacacaagtatcataccttcaatttggacttgttccgaatacatgcaacatgaattcatgatcatgggtctattttctatgctcaaagactggactatttattattccccgtaagggttatcaaccgaatacttgcgccagtcgggattcaattattatatctatttgggagtatcccataagggataatcactcagatcagaagctattcgtatgagctacacttggtctatatcacccggaagatttattactcgggagcatgttacatgcgtcatcctttaaagggtgtcgaaggcatattttttggcctaggcctaatatgtctgcagcccatattttcaggtgtagcctatcacgttcttttaaggacttaggcattttttgcttaggccaaagtgcgtgtgatcaagtgcccaataccttaaaatccttttataccgcagttactcaactttttaggagttggtacaatgcattttaaaaggtgcccagcagtgaagtttttcatagctgtcctactgacttttttatatagtcaatgtgctatttgggtttataaagcaattgattggatacaataccactgctttttgccacgtaagtgtgcatttttattgaccaatattatggcttaggctgattatatatcttagtcatttttcaggcggttggtaaatcctttatgagtttatttactcggattttacaccacatatgccgtatatttccgggtgtggtgaaaccatgtgtcttttagggacttaagcacatttattaaagcagtgtgtgcatggcgtatgcctaatactttgaaaatttctttattcacatcattcaagcttgtttatagctgttttgctatgtgaattttcaatgatgtagtcaactttaggttgctcgcatcaatttttacaaagcagtcggtatatcacttggatcatgttatttgggggattcacaccgcatatgctatatattgatatcaagtcacttggttgattacaattatcaaaaccactcggttggttggattatttattccttgactatatgcttagtttgttcagctaaccacgtagtcgggggctacatctattaggtgcatctagtcaatgcatctgactttatttttcagccctccacagtcttcatatttgttaaagtactcgggtgaccatggcaaagatgattgaagcacttggctttggagtaatctggttcgagagaagattatcttttcgactgtgaaggtctcaggggctactgtggagattatgggtaccccatacccacacggcatggttgtccgacgggttataagggataatttatatctatggaatatgtaacgaatcatgacttaggtattacgtttccttgtatattatggaacggcctaaagtcctggtttgataatattgtaaagtagatttaggaaaccgataccgtattggttaaggtttctatcttgtaatcctgccccccaccctatataaggtgggcaggaggccctctaggggcatgagacacaactagatcgtcagatctatactacacccggcggattcaaatccccaaacaggagtagggtattacctctcattgagagggcctgaacctgtctaaatccttgtctctacatccatccacttttaggtctcgtgcgctacccccttttattattgccgaattcatgtttcgacacagagcatgtctgcacatctgcccggaccgcccatttccctcagaccaaccaccgctttgatctcgtgaatggggtggtgttaagctgccaccagattagtggcccatcgactccagccctagctcatgccaccgcacctgctttccgccgcttatgccgccacaggagccgtcgttccccaaatccactcaatgcaggcagccaccaccaaatcccgccgaattgagcgccagtccaccagcggcaacagatggatggcggcggctgatgaggaagctaccaagcatgtggtagggaggggatcgaggaggaaggtggcaggggacggatcagtgagaggcgtcgcttggcggggagttgcggcggggcgaggcgcgagccgcgagccatcacagcgggggaaggaggtggaggaggtggcggcagggagagggggggacagcgtgggagcagtgccccaagattgaaatagaagatggtgctaatgcatagggctaaaaatatatagctcagtaatggaaatcatatttcaaaattatgaacttagaaatccatgtttcattaatttggaaaaaacatgtatgcccagttgaattagaccatccatgtgccctgaacaatgcaaaccaagagctcctggtagatggtaatatctgtcttgtcttttcctcaccggttcggtaattgtattgggcttggtatagcatttagcaattattaaacactagatgacagacaaagcactaatcacaccacatagctacaggcgagttttcttcttctctagtcgctgcaggctccaatatatatactctgactgtcccagtgatttatactagctttgagcttgttgggagaacacttgaggctggaagctgaagctcgggcttgcgccccaacaagccccaatggtgaatccgcccctggtgggagcagtggctggctagggtttcggtggggaggggattggccgatcggggatgttatatttttcaaaagagcctccttttgtttttcagagtgcggacctattttcatgtttttcttttctttgcataaagttttcctggttatagagggtctaaacgttaaaaattaaaacgtaagaccgtatgtatttaacctaacaaaagttacaaagaagtgaagggttttttttttttttttttttgcaaaacttccaccctcatcatcctgcccgtccactcaagctaatcggacggcgcgtgcggacgcgaaatccgcccgcctcccagcgcgctggagtgacgtggatagcaccgcgtgcgaacacgtcggtccaaaacactttcagcgcggcaactccagggtggttttaatgcattcatatgcactagcggaggtagagtatgggaggggagtgcccaggaacccgatcaaaataaaattgagctatatctcatacattttcaccatgtgtgcactctctaatacaaacttagatacccgcatcagtttaaacttgatctaaagtgtagaataaattaagtaagtggcaccctctatttctttctacctcgcccagtgcatgtgttttttttctgaatgactaaatatttaattgaatgaggtgatacaagtaatcaagggtataaatgaattaattaattattataaagttcaaaaaaaataaaagaatagtctattaaatttatatataagaaaatgcccgtgcgttgcaacgataaatgttattttaattttattatttttatacggtttagctagggtaaaattcactgtgcttgaatatttcttttagaaaatcataaactgcaattaggagtccgtatttcatctcaagctagaatgatttttttaaagagatttcttatacgacttcttttgtattttcaaaggcaaacgagttttaaatccaactcaaacatggatatgcattttcaaaagcgaacgaacttaaaaactgactaaaacacggatgatgtaccgaaataccggcaaaaaaatctttaatttttataatagtagaaatataaaataacgtaaacatttatccattcatcctttaagagaaacaatactccgtacagactagcaacaccgtgaaacatccccatcctttaagagaaacaatactccgtacggactagcaacaccgtgaaacatcccatttaaatctagagttaattcgattcataccattgtaaatgtggctattaaaaaaaagccattataattcgtctattcgtaaacgtgtcacttaaattttacaaaattagaaccataccatcgccgtcacatttttcatcttcctccccatctatacgtgggcccaccggtcagattcattttcctccatcctcccctattctcttttttccttctttcttgctaggtagagcagagggaagagaggagcggggcgccagtgctccggtggctaggaggtggcgaggtcggtggccaaatgtgttctcgtgccgtcgcccccgtcggatgctgccgcagggttccgctgctgtcgccgctcccgctccgcgcgcgcggctgctgctgctactccgctgttgctggcactgctgctccgctgccgctactcctctatgctgctgtagttgctactgccgctactgcactgctgtgctgctgcagcagctgcgcggccaacgtgggccgcgcgctctggcgcggtgccggcaccggtggtggcggggagaggatggattggtggggaggaggtgaagaagtactggagagagatgggaaaaaagaggagggaagaatggaggaagaagatgaatatgactggtgggcctcatgttgatggtcgttatagataaattttgaccatcaatataactaaaataaaggggagctagctatacttgcaatgcatatttattttagaataattatttgtttgcagtgattaagcaaataaaatggaggagaactcatccttaagcaagcttaaggataagatggggccacatgtcaggtgtaactgtcctcgaaaccgtcataactgccacaaccatcatagggacccacttgtcagtgccctagagtagtttggaggcctgttgggccggcccaagtatggccgaaccctggtgacgctagcttcgactggccttacacatggacgctcctgatcgctccccaatgacggattgacggtttcagggcatattggacatttcgcataggctacaaccatcatacctgcctatttaaggaggagctcattcacacttcaaaacacacttaagaaagctcaacatttctatctatactttagtttagtattctagtgctaagtggagtagagtggaatagctcttgaagtcctcggagtctttaggggggaattcgagtatggcggtagtagcttttctttattcttttgtaagacttttggaattaatggaatattattctatatatatttatatattcttggtgctttagtttatgtaagtatcgactttactttatatctgtatcggtatagttgtgtagctagcctaccagagaggtgcaatggtgtgggtttaatgttccattattcggttgctctatgtcatcctaggggatatagagtagtatttaataatgtagacgtggtgtttagattattaagtatcattatctaggcatatatgctgcgggacagtagaggtgggccgctgatggtgaaagtttagtacgggtattcctccatgttagtatatattcctaagataaattcctggggagggtactcctccgtatttagtcccggttggacagccatgataagttgtcgtaaggaactcggcaacccaggatggtctctcaaaacaccaggagggcattgttagagggtattggccatacaactgtatactagcggatataaactaattgatggaacgtatactagaagcataggaattaattgcttttttatttcttcttccacatagcgtaggattgattaatgagagatatgagttctttgctttgtgccactctacccttatgattatattaacccctgtttagactctgatcatacaagtggcatatatacattattagcatagttcttttttacaatcttcccttgggattaaataaataaggctaaattgtttcaggacattgaaaatttgtgtaattggctgtgggacaccacaaaattgtgtcactgctaaaggacataaaaaatagtgtaattgtctgtaggacaccaaacacattatttaataatttccatgacaaagtggagagagaattttaaaatgacaagctctttctcccctagctaagaggaggtggcggcggcgagtagctgtgcaagcaggcagcggcccgctgctatgggcggcccgctttggggacgtcggccacctgagcaatgctagcctggcgctgggcctgtcccttggcagcggccaaggaggaggaacgaccaacgcgacggcacaccatggtggctaccggtggccgtattgctgtcgctgcagccatcgttgcacgctcgacaaaacgagggacgcagctgcgacggcgaccgtggccctacgcatagcgtgtacacattgttgtccgtgggcgtggtgctaaagagggagtgtgtggaggagatctacggtgagcggatgttgctggagttgttgtcgtcggcgggtggtcggacgagcaagacaacaacaactacgtagggcaacatccgcaagaagctccggtattgatttgtatttgttcatccgcaaagcacggtcttcctggtacatcacatatgtcgacacgttcttgttagactctattgatttgtatttgttcatcttttgttgatcgaatacatgcgagtcactaaaccaaagctttgtttctttgagcagaagcagaaagtcccaacttaagctcaggccaagccaggagcaaacttgtcttttttaaatttctctctccgctttttcttaaaaattataaaataatgtatctagtgttctacagacaattacatcatttttatggtgtcttttggcaatggcacgatcttacggtgtccctcagccaattatacaaaatttggatatcacgtagcaaattttgcctaataaatacgataccttggaatactcccggataaaatactacaatgatatatctgtgcgcttgcggattccttctgtaactgtatatatagcaggaccatttctagcgctattgctggaaattcatatttatagtaatgtcgttaagaaatatcagcaccccacatgtaaacgggaagaagatagaaaatatgacggtgatggcatggttccaatttcgtaaaatttaagttgcacgcttagaaattgaagaattgtaatgactttttttttaataaccacatttgcaatggcatggatcgaactaatgaatatgcacataacgacagatgttgtagcactagcactgttcggaagaattagtgccagtaatttcttcaaaactacttcttccgggttgataatacttatcgttttggactagagacggtcttgaaaactaacattgaccattattttttattataatatatataaaagtgttaacagctatataattttattaaaatattttttaagactaatctatacatgtagttatcatatttgaaagataaatattttaaaaatgatttataataaaaattctaaagtttgatctcaccttgtttaaaacgacaagtattatcggtgcggatggagtattttggagaagacttcaattgtgaaaactctaccctcgtactgacaaattaatggcactactccagtgcactaggaacagtacacatgtgcgtgcatgctctgttcttatttcgagtttgtcctgcagaaaacctcgcacccgactatccaagcacagaggcccccgacacgagtacacgacacgccgtcatgcgccacgccgccgccgccgccgtgccgctggcgaccaccgtcgccatgctgtacgcccgcctcgccgcctccctgaccggccctggcccccgccgcctcgccgcgctcctcccggcgatggcactcctccccgtcctccctctcgccctcccgtactacagctaccgcggcttctccgccttcgtcttcgtctggctcggcgagttcaagctcctcctcctcgccttcggccacggcccgctccacccggcgctccgccctctcccgttcgtcttcactgccgcgctccccgtcaagctcgtcgacgccgccgcggcagcagcaggcgcgtcggcgtcgaggccaccgccagctgcacctgcagctacgttcaagttcgtcgtctcgtccgccatcaaggtcggcgccatggcggccatcgtccgcgtcctccacgccaaggaggagatgcaccgctacgcggcgttctccctcaacgccgtcttcatgtactgcttcctcgacgtcgtcctgccggccctcggcgcggcgggcgtggcgctgggcatggagatggagccgcagttcgaccggccgtacctgtcggcctcgctgcgggacttctggggccggcggtggaacctcgtggcgtcggcggtgctccgcgccgccgtctacgaccccgtcagggcgcgctccggcgacccggcggccggcgtgctcgccgcgttcctcgtgtcggggctgatgcacgaggtggtgatactctacctgacctcccgggctcccacggggcgcgtcacggcgttcttcgcgctccacggcgtgtgcgtctgcgccgagcggtggtggtgcgcgcgccagcacaagcgcgaggcgaggccgcagctgcctcgcgcggtggccgcgccgctcgtactgggtttcgtcgccggcacggcgttctggctgttcttcccggcgatctacggcggcgggatggacgacctgtacctcgcggagattgcagggtttgcaaaaggcctcggccttggcggaagctggacaggggaaaactaattctaatatgtcccatcgtgtacatttttttcttcaaattcaatgcaactaattgtaaaatgggacgcggatactatatgcaagtatgcattagtagtatatacatcggtttcaaaatatagtaatttctagctatctatctgaataaattagtcagaagttgttatattttagaatagagtttcaagcaacacataccaatgagaagtccatagaattttagagggcaactaactaaagatactccctccgtcccctaatataaaggattttgatattttattttgcattgtttaaccattcgtcttattaaaaaaatttagaattattatttattttaattgtgacttactttattattcaaagtactttcagcacaacttttctttttttatatttacacaattttttaaaataagacgagtagttaaatagtgcaaacagaatgtcaaaatcccttatattaggggacggagggagtaaaatttaccgctaatgttctacccaatctactggtataataattccataataataaaaagatagctcgaagaggagttgttaacttctgtagaagaatgtctgcattatagatccaagatcacacaagacagatgtttggagttcaatgttaaccttaacagagacgaatgtgaggtgaagtacacatgtgacatgccatcattttgaagttcaacgaatcctgtgttggcctcaacttcttgaggatcaaacaagttccatccaactgtattgcagaggcggagaaaagacttgaaacagaaagattttttttttccaatgttcatatcatgatatggttaatacatcgctggcaagacgttctaatgagcttatgctatactccctccgtcctaaaatacaagggattttcgatgtgtcatatccacccaaaattccttatatttaggacggagggagtacgaccttttcttcccagctctatgctcaaatgtacatttggattggatgaatcttgagcttgtggaccgtgggtagttcttccatgaagtggctaggatgcagcagagtcagattgacttctggtgataaaatagcagtggagatgtaaaaaaagaaaagaaagcaaaacatccatcagattcagaaatctaatcttttggaacatctagattatcggatgtcaaaccaaagcaacttttctactagctcaaagaactcttcaagcggtacagaaaatgagaggaaagaatcaaggtaaacgattcacaagcaaaactgtaccacagaaaggacaattaacttaatgaagtgagcgatggccgatggacaagggcgctctgacgaatcagatcttgaggagttcgcaactgttcagacatcagcatcaatttgacgagttgatgaactgatggcactcgctggagcagcatccttggtagactattcctgggagcagagcagcccgccagctcatcctgtggcctgtaatatgcatagccgagaattgtgacaggggaaaacatttggaaaattttttaaaggaaaaatggaggaagttcacaggatttgaacccaataggaaattctatcagattagcagtagcaccatgaattccatttgatagacagtgttgcatcaactgctacaagaagacatccagatacatcctatacggatctatcataaatatctgtgaacaatcaagcattacaattcaaagaacgcagccgactcaatgagtggcacaccatgagatcagtatgatttctatcttcaaaacattgtgccacctagctctgcctctggatatgcagcgagagtttcttaactttgcagctcatctttcttagctcattgtttccgtttgcttgctatctttgtggcttctcttccgcttcctaactctctttcgctttgcctccccatcagctttgggcccctgtaggacacatgttctcatcagtcctcgtgttgcatcgacagcaaacagctcttctagacatgcttttccaacaacataatagatactaataatgggcatgttaatctgaaagtaacagttttaggtattattacgtacaactactgagagaaaaacaacagtgatataaaatgaaaattacctgattttgagcagctgacaattggggctttggtttctttttcttacaggagagtgggtttggtccctgcagaaatgacaagcaataaaaattacttacggaagcggaactgttgtagcaaactttctttccacactattatggatagttaaataatgggaaaaattggattcaattgtcaagcggtcctatcgaaaataggattgactatggagtaaggctgatgatgccaactagatcatacgtattgttgcgcttgcgtatacatctaatacatcagaagccagaagaaaataacagaaaatattaacctttggtcttttcttcttaaatttgcttttgtcggccaccccaagtgcattttctacaagagaactgataggccttctgttcttttcatcatcacttgcgttttcactggcagccgcctttccatccgatggaaccttcagtagcttctgatattctgatttacccatatgcagacgcttctcctcgtccaactgagcaaatttacgttgctgcacagagggttgttcaatgaacaaggagctcttcagaccatatatcacaggaacaccaggaacctgcatccagtcaaaacacacatgaacacataaactgattcaagagaatatgtaatggcaacatgtacattattgtgcaccctccgttccatagtgtaaggcgttttgggtttgtcctaagtcaaacttctttatgtttgatcaactttatagaaaaaagttgcagtacttccaacataaaacagatatactacaaaaaatatatattcaaatgtggatttaatgaaactaatttggtattgaagacattgctatgtattttttaaaaacttggtcaaacgtgatgaagtttggccctgtttagttcccaaaacaaaaaattttcacctatcacatcgaatgtttggacacatgcatggagtattaaatgtgggaaaaaaaaccaattacacagtttgcgtgtaaattgcgagacgaatcttttaagcctaattgcgccatgatttgacaatgtggtgctacagtaaacatttgctaatgacagattaattaggcttaataaattcgtctcgcagtttcctggcagaatctgtaatttgttttgtcattagacaatgtttaatacttcaaatgtgtgtccgtatatccgatgtgacaccccaaaacaaaaatttttgccaactaaaccgggccactgactgtccctgtcaggggcgggcgcagctatgattcaagggtattcagatgtatgcccaagaattttacacaaaaaataggtatatatactatatatttcgtatatgaattcaaacaaataaaaaagagcctcaaatacccaataagcaagcaaactagttttcttgggcttgcttcatcctccctcctcattcacccattagcccaaatgtattgggcccaaattccccacttccctccctctctccagctctcctctcccctacccacttccagcctcacccatcaatctcacacatcccattccctcagtctcccctaaccctagccgacgggcggtcggcgcaggcgcacagcctcgcggacgttgggtggccggtggctggacggcggtggcgcgggcgcgcaagtggccaaacacgcagcggcgatgctcgggcgcaagcgtaggcatggcgtggcggcaagacggcgacggcagcgcggggcaaccgaacaggctcgtggtgtcggtgccgcattggcgagctgacgacgtaggcaccaggcaggcagcatcgcagctcgcatggaccaagaggcagggacgctgggatttgggagcctgggatgttagtacttcactgatttcattttttgttctgcacttctacttttctagtattctactaattgttcactgagtacttggaagttgattcatcataattgctaacttgcagacttgatttaagtaactagttaggcgcatgtaggggaatagtaagtaggatttgtaagattacatatcattttaccattttcaaaatatcaagaattgaaaagttcatctctaaattgaaagatttcttatcattttaccattttctattcttttgtgtgtacttcatccaattagtacttacatatgtgctatatattataaaattatatcaatatacgaacttatgtgtattttgtgttatatatgctatatattatataattactggtgtgttatattatatacatcatttattaggctcttgggtgtaggaaatttttttaccctactcctatttcgaatacacaagttctaaatcctgggcccgccactgactccctgtccagatgcttttgcataacataattaaggtgataattcttaaattactctgaaacagcgtgttggcacgagcacgaaagggtagtgaatttccatacctcccgtagctttgcacggagatcagaatcctgggtggcaacaaagaagtgttcgggattcttttcacctatcagtgacagaacacaatccactgcactgactactttgtcatgctcacacctgaacccacaaacaaaaatttccaatggaacaaaaccctcattgcctcataagagaaaaaaaaaaaccatcgttagaagtagaagtgtgctactacttacttggccgtggcgagcagggcggcggcgtcgaaggcgtcggcgtgggacttgccgaggcgcctgagctcggcgaggacgcacttggaggtgaagaggggagggggcctggaggcggagaggagggactggagggcgtcgtcggcggggaggaggctgtgactgaggaggtggtggacgaaggtgccgtcgacgagcaccctgtagggctcgcggaagccgaagcaggtggcgtagaacctgaccaccttgcggttcttggaccgcctcttcaccctcatccttctcgcgtctccctcgcgggcggcggcggcggcggcggcgaagggcggcgctagtggcacgaggcagggaaggaggggagggggctcggtcgcctcgccggcgcgggaggggcggacaacgacgtcgcggttcaagataaaggtggcaggcgcagcgcgacgtcggcgtggaggtcgaagagtcgaacggcgccggcggtctgtgacggtggaggttgtgcttgaaggagttagggttgatggatttgggctttgatgggcctggattgaattggttggtttcttcgcgctggaaggggttttcccttggaaaaggtgcacttaaggcccctcattctgtggacgagctacaaaatcatccttgaacccaaaaaatactctataacatatcccttatcttataaaaccggatcactttgggtcctaaattagtactgttcccgattttaggtgacgtggtggctgagtcaatgtgaaacccacctatcatactcacaaaaaatcattgccttttctcctcactctctccctcactcaacgggtgtccttggcgccggcccagtcgatgttgcgggagattaggtgccatggcgaggaggaacacatggcgcttgtcgtagccatcgccgtccccacgcacaaccagcaacaggtgtcgccacgtcggctccgacgcaaacatgatgagcgagtggatggcgcagtaggtaatctcctgagagggccgggagtggttgccaatgaggtggccgaggagcgctggcggcgcggtgaggaagctgtaccaggctccaggcacaaatagggcgctctgttgggtagtgatgtcacagtaggtgacatagcagtcgcaatcgtgcttgttgttggggcactagacttggacgagcgggccacaaccgtcgacgagtgccctccctacccccacggaccctaacgacaacgtcaacaaggcagacaagatggtaggcgaggctcagggtggcaaggtgaagcgagaggacgggtgtgcttggcgccagccccattggtgtcatgagatacaaggcgccatcgagaggagaaggccaggggcaggcggagccacggaggcggcgaagcccgtcttcggagaagctctgtcgagctccagtgcagagtggcacccatcttgaggaggagcagcgagggcccctccttgcccccacgaacccaacaacggcatcggcaaggcgaacaagaagggagcttctccaatcaaggtcccctccagctacaccaccggcgtcaacaccaccttctacgtaagtactcgtcgtcttcgtattcatttcataagtcaatttgtattgccgtccatcactacccactcgtcacccaaggtggccagatcttccccgaccgctagatgtgagatgcctctgattgggccactgacggcgagcgcttcaagtccgactactgctaccatatgttcgtctcgtgctatagagacctcaagatcgctggctgtgaggttgacgcatcggcgagctgtcacctggtgccggcatcgctgtcgggcggcaccaggctgagtgcgcaatagaacgacaccatgagctagacacaacatatactaatggagctcgacatagcttctcagaagacgggcttcgccgcctccacccgctgttggcgttatcttctccatggcgcctcgtctcccgcaacaccgacagggccagtgccgagcatgcccgcttgtgcggactcatgctgtggatggtgggtggagcgggagagattggggactcatgaagaggatttttttttgtgagtatgacatatgggtaccatactgattcagccaccatgtcacctaaaaatggaagcaatactgtcttagaactcaaaatgatctgattttgtaaggcaaggaaggcgttatatctttcttttttttttcttttagggatgattttgtaactcggcagtaaactgaggaacctgaggtgaacttttttccttctcccttcgggcatgatactaggccgtgatgggctgggagcctgggacgtttttactgccaaagtggacctattgggccactatcctatgatagtgggatgaaaaattggactggatttaggccgtgttcttttctaacagagatgcatgctttctattaccaagcttttctaattgctgagcgatatgttccgtgcaaaaattttctatattgaagttactctaaaatattaaataaatttaatttttaagtttataataattaaaacttaattaatcatacactaataactttcttatcatgtatggccttatttaatctttatcttcattagtacgaataggtttttacaactttgtgacatgcctttactactatgttatgggttcctagcgcttgtacgtttttcatagaaaaaatagatataatattttaggggtgactataaaaacttatcaaaatttctaatgccaaatctcgataacagtaaatcaaacatcaactacacctgcgggtaggtcttaaatatcagcaatagctattatagacacggtactacagagaacgacattattctcccgctattaaggatttggggtttagatttcattgattggtttgtttacttgaaacaaggtgcatgaaaaatcatgctattacattctacaatgatatggctcctcaacacatgtaagcataaagttgatccaaccatttagaaaacatcctcttacatacaagcgttatcataactctaacgtcctcttacatacaagcgttatcataactcttccataaatagttagtcccatcacatctaacaaataaaaccattttttaagtacataacaaaatatcaccagcaagtaactttagaactggatttttcacattttggtccttttgaaaaacttatttcgcaaatagacctctgaaaaaacttattccagaaatggtcctttttgggacgccagagtggttggcgccgtccctcttttgaaaaacttatttcacaaatagacctctgaaaaaacttattctagaaatggtcctttttgggacgccagagtggttggcgccgtcccccttttgaaaaacttatttcacaaatagacctctgaaaaaacttattccacaaatggtcctttttgggacgccagagtggctggcgccgtcctcctgccaccgtggcactcgcgaaccgacgtggcaggaagagggcgccagccatgctggcgccgccccccccccaacccctcgcctccatccctgtttctctgtatgtagttgcaacagtgtcatttttgttttattttttcggatattttttcacacttaggatcatgatacaaccaaccataaaaaaaatataaactcgaactaccacttagctaagtctgaaaatagctagcataccacttagtctactttgcaccttcactaaaattagactataactcctttagtaaaaccctttgcataactcctttagtaatatcctttgatcagcatgttacacataatgcactctatcactatatgaaattacttaatctaattcaaaatatagccaaatgaaatgatagccataagttaaacagtacaaaaagatacaattttttttatttttatttcatttatttgatattttttcacacttaggagaacataggaaccaaccatataaaaaataaactcaaatggacaaaatatgtgacttgtagaattttccaaaactctaccggaacagacaaaatatgtcatttattaaaataggcgtaactttctcatatggactcggaatcaggcaaataatatattcacggacatctacagaaaaagttacatccgattctccatggcttcgccgggtttggcgatattaaaacctctgaattccgcttgcaagattgtgtttttgaggagagaagtttttcggtaaagctttcgaaaattccacaggccacatatttcgtccgtttaagtttattttttatatggttggttcttgtgagtttctaagtgtgaaaaaaatatcaaaaaaataataataaaaaaatttgcacatctctctcctctgtactagttcggagagagatgagaggagaaaaaaaattctacaagtcacatattatgtccatttgagttcattttttctatggttggttcttatgtgtccctaagcgtgaaaaaaaaataaaagaaaaataaaaaaaattcgggggggaggggcgccagccactatggcgtgctccccctagccacctcagcatcgccccgccacgtcggcagggggacggctggcgccgtctagttggacgacggcgccagccactctggcgccccaaaaaggatcatttctgggataagtttttccagggatctatttgcgaaataagttttttcaaaggaccaaaaagtgaaaaatccagaaattcagaaactattttaaaagcttgactacgatggatgatcccaagagcttgtagcacgccataatttcataagcaaaggataatgatcacgaatgaatatacgtataattgacaactaaaaattcccggcccatgtatatcttttgaaaacttccactaaatcaatctacaccattacctctttttagagaaacatcccagacgcgagaaaaacactgctcacagaaatagtgagcattatcctataattacgtcgctgcccacactcccagaaattccaaatgcccccattttcttcggttccatcgcttcgcctcctcctctttttctttttcttttttttttctctcgcccatccatcgtctcctttttcctcgctttctcccccgccacgaaaggaaccaaccctcctccgcagcccaacaaagcgcccgcggcggtcgctcgcggatcaacgcggttcacacgcacgcagggctaacatggcgggggagacggattccacgccgatggccgcggggcgcgccgtgccgccgccgccggaggccgccgccccgcggctcctcctcctcggcggcggcgccgagctctggcggcccgtcgcccgcggcggcgggtgggccaccgccgcggcgctcctcctgctcctcgcctcccacctctccgtcctcctcctccgccgcctccgcctccgccgccgcctccgacctgctgacgccgtctcctcctcctccgccgccgccgccgccgtcgtcaccgcggactccgccccaggctccgccgcagggtttggtcccctccgctccttggccctctcgcgcggggttttttttttttgagcgagaatgtgatttgatcagggtttgctccgtgggggtgtggatttcgcaggatggatggccttgtgacggagggcgatctgcgggagctggtgggcaacctcggggtggccgcgcgtgagccggagagggaggggtggcagcaggtggtcgccaaagggaacgatgacgtctcctacagggtgtggtgcgacaagcccatggtagctctatctcctcctgttcttgttgaatccattgatcttgttttatattgttgcgggtcactggaaatgttttattgttttatattgttgctggccaatggaaatgttctaatgatctgcttcttatcgtaaggcggattgtgaatttactctgcctacttgtgtccatgcgatttactagctgcgaaaggccacaactaatgcttactgtatgggtagttcatacttcatagtgcaagagtacaagtcgatcgagaaaattaagattgtaggtattagaataattcaaccccatccaccctgccttaatgctttaaaagtggatgcgtagttgtagggtgtcatttgatatcactgtttggagctaattttggtatcaccttctcaatatcccttggtctattcccctaatgggcttaaatttttatgggacggtgggagcatgccaactctgtgggtgagatcttagaaccacactagaattattgatattggtttatgtgtgctctaggtacttgatcatgatttttttggttaagaattgacaaaagaaactaaagctatttaggctctgtttgcaagaacatgttcccaacccaaacagtaaaaacggaacacggagcggtccattagcacgtgattaattaagtatttgttaatttttttgttcaaaaatggatcaatatgatttttgaagcaactttcgtatagaatttttttgtaaaaaacacactgtttatcagtttgaaaagcgtgcgcgtggaaaacgtaagtatggagttgggaaccagcttttgcaaacaaagccttaatactttagaattcaaaatagttgggggattaattactgatcagctgatgcagtctacgtgaagttacctagggtttaggaattttcgctgggttctgccatgattggattttgatgcctggtttcattttgtgatgctatttccatgatgtcctttgacccattacatttttgggaacatcacaattcccaagattctatttgcttgctcaagtttaacaattcagtttctttatgtaacagttatattcccctatgcaggaaggccctcctagatatcttagtgtgacaacatatgagagatgctcaacagagctattgagggacttttacatggataatgagtatagaatggagtgggataacactgtgataaagcatgagcagctacagtttgatgaaaatagtggaatagagatagggcgtacaatcaagaagtttccgctcttaacaccaagggagtacatattggcatggcgagtttgggaaggaaatgacaagtctttctactgtttggtgaaggttagtcacatctctctctccatcctttctcgtcattaaattctcaactgtttaaaagcgatattttttttgcgaggtaaaagtgtgatatactttggtgtcattgttttggcttttgtacttatgcagtaatgtaaacattgtagattattcgttcagtaatgtacttatataaggtctaagctttcggtaatgctcatggagtcagttgcagaagaaaccaatgatgccacaattgttgattgtgtcctaactacatcttcaattctaatatgaaattcaagttgaattggttttgatcctatgcttgacatttttaaatgaactaaggacctgtttaggatgtgggaatttcacctattgtgggaagtaaactgctccctgtagaattcctgcattctgcattgtaaacaaacagcctaaaacaccactgatatagccgagaatacacaaattctagggataatgcactgtacacgcccaatttgagaaaatacaaaatcagttgaaatctaattgaatatacaaccttagaatgaactcaccaatttcacacgagtatttcatatgcaattttgatgacattaaccttatccccattatcttattttctttgaccactcagtcattttttacaatttgttctgttgttgccaatttgttaacctggacaggaatgtgagcatcctgttgcaccaagacagcggaaatttgttcgagtgcaacttttgagatcaggatggtgcattaggaaaagtaagtcaactctaatattcatagaaggccttctttttgcggtccttattgagtttagaatgacctatcttgtttcagtggtatgtattgcgtcgatgtaatttctaaaaaatacgcatagaataacttcaaatgatctaattgtttggtaatgctttaccagcctctagtatctacagtatatattttatactttaatatttagattgaaatgcagttggatgaatttgttagctgataagaatgaaaggcttgtaatttttgtttctgcatccatgagttaatacactaatagttctgttgtacttgttaaccaaacagaatgggaagagttctactgaagctataagcaggctgtgtatcaactgaaaataaaacaaatattcttttaagtgtttatttttgaagaataaataccattgtcacacatttcttctccttgccatcaattttctttatgaccttgaatatgcaactgaaagttgagccattatgacatgccatttttgctagcttatctcgactctcaattttctttgttataattatgatcaaaaggcatctataaattgttattttctggggatgtatctcatatatgttcaactacttttaaatttgatgttgcttatatgctttatgttactttacagtccctggaagggatgcatgccgaattacagtgctgcatcatgaagacaacggcatgaacatagagatggcaaaactggcatttgccaagggcatttggaattacatttgtaaaatgaacagtgcactacgtcgctatcctcaacgtaacatttcatcaatatcaattctgaccatgcaaagacttaccaagaaggtaaatagtcttgacctattgaccaatctgtggttgatatttctttaggaattggtctatttatgttcctataagcatgaatctgtttttgttaaaaatcatatgtacagtgtgtgtccagtttattttatttgttttatgtatacaatcttttaggtttgaggataatgattatattttttgaatttagaatatatgttatagccagtcgagatcataaattcatacaataatttatgtgcttatgttgtatgctagcctgctgaagcctaccatgtcttgtagattgtctgtcctttacttttgttcacaaattacagctactgaaataggcaatgataatctttctggagatagaatctgttttttaaagtttgaattatgtagtatgtaccccccacaaacctgtgaacggtttactgtcctattatttcgaattatggccattttatggttcatgctctgatgacgcttgtttttgcacatcagtttcctcaggccttggagactgatgtagatgcaaatcatcatcctcaaggaaatacaagagcaaatgttgttcctacacattttgcaagaacttcatcacgccaacagccagggaagaagtcatctcgggcaacgattgcaagtggacttctgcttatcggaagcattgtttgtctatcccgaggccgatctaaccttggggcccagcttgcaatggcattcttcttgaagaaggcgttcaaacaagataaaggatcgagctcgcagaggagcataagtagaactgatgtgactgaacccaggcacttggaatagtattggttaaccttggagacgttttaccttgaccttttcttcctctttcttgagaaaaagtgggaatatcgtttgcttgataaggcatatctgtacacagcatgacggattatgtaaataataggtttgtagttgtctgtgtttgccaatgagtacttctgtggagtactacatcgtctcactgtagaaatcgggtacctgagaatattaatgtatgaaagttaattttggagcaaaagagttctgattgaagaaggtgactgcaagatatgtttggatggaatgctgcaaggattgttatagacatttccaaaactgtacccctcatctcaaggtaaaccgtagcctcaggctgggtccgctgggatgcaatttactttccgatttaccgcatgataccgaccccagcggtaggcggtttttgtatttcgaacaagttcggtccaatttattaagttgggatttatactagacaactgacggctaacaaaaaaaattcagccgactgtcagctagtcagtccctattaagtttatgaaaaaaccttttgaaaatttgatcgaaacctgctttcgcctacgttgaaaccttaaaatttggcggttttggacggccgtcggaaacatgaacaaaccaggtgccgctctcgtgctgcaggcagagtggcgggtactggtgcccattggaataattgaaaattgaaaactgaaattataaaaaaatatattttttttcaatgtcaagcataaggtagtatattaatgtattttatctgccggatctatgaggaaaaaatgaattagtcatgcaagaggtttgaatcaaatatagtattaattttgaaaccacttttcgatctgattaggaaagcaaaaccgcctgctcgctgcacttctgtacttgtatgtgtcgactttggtagcattgtttatcaatttgagtaaggatgatctgcaatgaaggggcaactatctacgaactacgggacacacacaatcaacaacttctgtgattgatcaattacactcatgtgagcttcggtggatcttcaaactcatcctcggttccactgtgtgtccattggtagctatccatgattatgtggtctagcattaattatctctcaagtctgccacctcttgcttgttgtagtatcctcgtgttctaatgtagtgcagtaacaagctatgtgtagttttaaccctgaggtcccgtgtttaatcctaacacgctcacaatttttttaattttttcttaaaagaatgtttgaagacacgtatctccctccaaacagtggcgaggccacatgggttcaccacagggggtgccggggagggcctggcacccctcatcctctgatcctcccccctcctcccccctcccttccctagataaataattaatagatgcaagagtatatatcggtagctagcaactcactaactgcgagtatggatatgtgtagctgaatgcgtatgcatagctctagctgggagcatcgatcagcaactcactaaaactcccgcaagcagctgggtgaagcttttgatgtgatgcgacaaattaacaggatggagtcttcaaattaaagaagtaattgagatgttttgtagtgcatcaaatctcagtgctagactgctagtatagaactactttctccgtttcacaatgtaagtcattctatcatttcccatattcatatttatggtaatgaatctagatagatatatatgtctagattcattaacatcaatatgaatgtgggaatgctagaatgacttacattgtgaaacggagggagtacataaattgtgtttaactctctcttgcatgattcaattatgtaattcttaggttgcattcgattcagcgattggaagtatatttctaacggcagcatatgattaattaggtattaattattagaaacttataaaatatattaagaaacttatataaaaaactttcctacaaacaatttatttaaccgtttaggtagtacctcatgaaaaaccgagaagttgtccaaaacaactcagccttactaaagaagtggatggatggagataaaccgcctagacgtccacacaagattgattgcaaggacaccattctgtaggggggtgaaaactgatcatgcatacaacacgttgttcaccaagcagccaataagctttcttttggatacattgaccttatggttggcccccctaatacctaaatcctggcttcgccgctgcctccaaatctccttttttttaaagtatcctcgtgatctgaaagagagactgtcatgtaaacgtggtagatgccgatcattcccaaagctgcctcacaatcccactcctatgcattgcacatacgacctacgggcatccagtgccacacctatcttatgtggaaatacacaccaacaaacaaatgtaagcattgggtaaatacttgatagccctacatcattatctatcaaaccgagaaaggcatgtacctcacattagagaatgtcacaatgctgttctccttcactctactaaaacttgagttcttttgactctccagcacctccacggctccacattattcttggcttataactagaggttgctgctctcctcatcacccaggtaatttacaatggagaaacattggcatgcataggaattggaactcttgcagcagagaaggtgaagccacatggttttgcctttatggcagcagagtactcctacgtttctttgtgctgtgctagcatgtgccttggtgaggatcgagatctacgactgcatgtttagcagttgcagtgcagccgatggataaaaaactgacggctcagatggtaagaaagtattgttcataaaatactgtggcaaacttacactgtagcggttactgtagcatcgatggtgcaacgggatggtagagcgaatccgagctgttgggtccatcgatccaacggttataatgtgctccgactgccaaggttgcagttgttactactacagcaccggatctcaattcgtcagtagatgttgaaatcaagtaaatatggcttccatgtgtgtttctaaaatataaaccatccgtatatatcaattaaaatatattaagttttatacctttgattcatggatatatacactttattgctactttcaactttatcaagttttgatatgactaggttttggtagggaaacaaactaaatataatgttatcattgtcaccctaacaaagattggcaattccggaagttctctcacaaaaactcaaccaaaatttgataaggtttcaaataaacacaaccgatagtataaaaatccggtaacgtcaaaacgtgtcaaaatttggcatcatcaaaatttggtaaagttgattttgactataaaatgaacaatccctatgtttctacaagatttctgagctggcgaatgaatcaaccaaagataatttatgggcaagtttttatatctatgtttagagctttaaaagtaaacgccgaaagatacaatacgatgagagaacctataaattaactttaatttaaaaccacaaatttaacttaaaattaaattcaagttctaaaatttaatttttcatgtggttgataagctaaccagaaaacaatgagagatataggcccggctcaattgtacttaatttcactgttgtgcggccaacacaaatagtgtattgtgtctgcaactgtactgaaccgccgaacaaacccatagtgttagtaggatcaatcttttaattaggcgttgtcagtatagttggagagcacaagtgatttcttcccaatgagcatgcaagaaattggagctagcaagcagggccggtcctgagtttttaaggtcccgatgcgaaactaaatgtagaggttgttaacgtatatatatgagttattgccataaacgtttaaattgcattcagaaatagaatttttatagaaaacattgtacatattaccttaaaattatatttgcttgacgttcacgtgttacctcttaaaaatttgtccaatgctcctttctaggcttttattaaaccatccactctttttcgtttttccccttttctcgctatccgatgcatactttatcgacaatatggcctaatgattgaaaaaattaacataactacagtgttttaactcgtataaagtatgctagaaaattacaaatctagatttagtatatcttaccaagtagttgattgcaagtatccgagtgcgcagcgcacgaccagtccgcaagtgcgtcgggacacacactgccattgttggttcatccaacactcgtccaattgaattagcaacaggcaacaaataacagattacaatttacacatggaatcatagttacaatttttcatatggcaatggtgttgttgctgctcactagaccagtaaagtgaatcagtgatcgtcgcagtgatttaggccgtgcttagatttaaacttttttctttaaacttttaactttttcatcacattaaatatttggacacatacatgaaacactaaatatggacgaaaaaaatcaattgcacagtttgtatgtaaattgcgagacgaatcttttgagcctaattacgctatgatttaacaatgtggtgctacagtagacatttgctaatgatagattaattaggcttaatagattcgtctcacaattttcaggtggaatctgtaatttgttttgttattagtttacgtttgatacttcaaatatgtatccgtatacttaaaaaaaattttggcacacaaactaaacacaacctcagcaaattagcaacagcaagacatcaatgaggcatgagaagaagtgtagaacacggcaacggcaagaaacctgcgcggctcggcggctgcgtctctggcgcctcgcatgggcgtcgcgcggcggaagcggaagtgcgcggaaacggccagcggacggcggccttggacgagatggctgaggtgttgcgacggtgctactgccagcggccgcgatcttgcgttcgcgacttcgcgtcaggacgtgagcggcggttcggcgtgatcgcgcgcgtcgatgccgtcgggattctcaggaactcggagcgtctccagcaactcatccaaattcgatcctgcatattcctatatggatggtcatccaaaaagattcatcttccatatctcttctcactccagcagatcatccaaattgcatcctccatatcacattcttctatattttataatatcttccaactaactttacatttgtatttgaagggatatattttgaataacttaatttaacggtgttatttatcgctataatatttcgaaatgagtaaattttaacagatatatttttaatggataatttttaactcatatatttaaaatgagtataaaagcaatgcaagtaacatatactactatatgctagtactactgctcaactatttcttctttttcctactagtactagttctctgcatcgttcttctttgttcctactagtactacttctctacatcaagctggcgagcccaggggcggcggcagtcgggcgagcgaggggcggtggaggacgaccgacgagggtgcatctggacagggaggaggcacgcggtggccgcggaggctgcgcgcagaggagtcccgacgggggcaacacgatgaaggagcagcggtgcgagcggtggggcggcgcggatggcggggcttccactccggcgatctccaaatggcagacctggtatgtccatcctctctgtttccccatggtacagtccggatggtggcgcgagtcatcggagctaggcagttggggggatgacgtgaggagagagaaacgccaaatttggcatggagagggctcggtttggaggatgtctaaaaatggcgtgtgtgatggagtgtttgctggagcatgatttttcccctccatatgctaaacaaaggatggatgaccggatagaagagctgctgggcatgctcttacctcccgcatgcatcagtttctgttgggccagaggggggtgaagcgggtggagagggacacctacgagtcgggggccagagcggccgcaccgcttgcccccctccagggccgggcctgtgcatgtttataaaacagtattgtaaaagctcatataaagtaattataaaaatctactgcatataaggtaccacaggtattagaacttccgatatatttctttcctgccacgtttacagtttctacccgaaacagggagtgacatatcacaattcatacactctgcagaggtgtgttgctgtacccataaacgccataaatcttttaatgcccacgcccgtcagtgcttgaagcatacttcatggtgtatgccggcaaggttaaggtcacaagcttttcatcaatcacatctgccaattatctctgctgcggtgattctcgcaacaattggcaaatcatcggatcctgcaacaacggcgatccacgtcatttaatcagatttcgcaacaacgacaaccctcatcgttagcccatgctcacaggattcgcgaaagtccttaagcccgcaggataaagccattaaaaaagaactaataagccagcctgtcccatttcaggtcatgtggtcgacacgatcgctaggacgcttgaatgctatataatagttattgtaaaaagtcacaccgtttattaagttaaaaacgtgcacgtcaaaaataaaataggtgaagttggaaaagtagccttttgttcagaggagggggttggaaatgttagattaatgggctaggcccaattaaatcctaataaattccattagcccacattaagtgctatgggtaataataccaccttggaaatcgggtgaagaggtctcaacttaaatacggagttagtggagagtctctgttgaccagttgagatggtgcgcggacagccaggcggggcgagacgaggcgagacagacagctgctgctgctgcgctctctcgttttgtaatggacagtaataaacacagagaattgatttcgtatcaatgaacgcgtcgttacggaattaaacaccatgaattgattccgtcggttacggaattaaatgccatgaattgattccgtattaacgagcgcgtcggtttcgaaattaaacaccgcggttgatgactccgagcgttactctcgcgctcgcatattatatactccgcagcgaccagaaggactggagaagttcttcccgatctctcttgcacttcgagttcctcctcctctgttcctgagctgcaaaatccttccccggttctgttcacctgcgcgcacaggtgtacgggatgagcaggtgcctctgaaactccgtccgcttgagaacctgcacgggtagacggacgatcaagattttgggtagcgcttcaagcgcgactgctcttgctcttcacggctactgcagctgcatcgtcaccttcaccaagatgtcgacggagattggagacaagatgatgaacgacatcaacggaggcagtgctgcctcaaaatccagcggtgggacgttctcggggtatactttcattctcccgattctattagatgtttctttgttaatactcttcgcaatggcatcattgtgttaatatgtaaatgttgatgcttattttatattaagcatactcaagttgtatacatctagcactgtcactagatctactcatattgcaaatgtcatgtttattgtcttactattttggattaaaatatgctgaattatgaccaaatttccaacaatccaaaaacttaataggtctttttcggtagttggctttgctgcatcactaaaaccacatgctttcgatggttcaaattataaaagatggaaagcacatgcacttttgtggttgacggcgatgcaatgtttctttgtttcacggggcaaaccgagtgaaccgtctatctcccctgaggaggaggctaagtttgaggctacggattgcttgttccgtggagcattgatcagtgtgctcgccgatagtattgtggacgtgtatatgcacatgccttcagggaaggacatgtgggatgctcttgaggccaagttcagggtttctgacgccggcagcgagctgtatgtcatggagcagttctatgactacaagatggtcgatgaccgttctatagtggaacagactcatgagattcagatgttggcaaaggaacttgagaacaacaactgtgagttgccggacaagtttgtggcaggtggcattattgccaaattgccaccttcttggacggactttgctacttctctaaaacacaagaggcaagagttcagtgttactgatcttattggctctttgggtgttgaggagaagtcaagggcaaagggcaaccggggcaaaaagatcgagggaggttctagtgccaatttggtgcagaagaagaaccctcacgcatcccacaacaacaacaagaaagtcaaacctgacgtcaaacccaaggctacaaccaattttaagaagaaaggcaagggaaaggtaaaaggagattgctttgtgtgtggcaagcctgggcattggtccaaggattgtcctaagcgcaagaacaagaagtctacaaacatggttattagtgagggcggaggaacatcgaggtatggtaaatttttacctatagttctctctgtctgtcactcacctgattggtgggttgatactggtgctaatattcatgtgtgtgctggcatttctctgtttcttcttatcaggtcgggagaggttcctccttgttgatgggaaatggatcgcttgcggctattcatggtgttggtatggtcgatctgaagtttacttcgggaaagatcgtgcagctgaagaacatgcagcatgtcccttcaataaagaagaatctagttagcggctctgtactgtgtagagatggttttagacttgtgtttgaatccaataaatgtgtcgtatctaaatatggaatgtttattggaaaaggttatgacagcggaggcttgttccgcttttccttggatgatatatgtaataaagttgtgaaccatgtaggcgatgatgatgatgagtccaatgtgtggcattcgcgactttgtcatgtgaattttgtgaattttggttgtatgacacgcttagccaacatgagtttaattccaaaattcagtttagtcaaacgctctaagtgccatacttgtgttcaattgaaacaacctcgcaagcctcataaggcatcgaggcgaggaatttggcaccactagaacttgttcattccgatctatgcgaaattaataacgtgttaagtaaagggggaaagaaatatttcatgacactgatagatgattgcactagattctgctatgtgtacctattgaaaacaaaggatgaagcattacattactttaagatctataacgctgaggtagaaaaccaactggaaaggaaaatcaaaaggttgaggtctgataggggtggagagtatttttccaatgagtttatttctttctgcaaagagtatggaattattcatgagaggatgcccccctattcaccccagtcaaacggggtagccgaaagaaagaaccgtactctaactgagatggtgaatgccatgttagacactgcaggactgtccaaggaatggtgggtgaggcaatattgattgtgtgtcatgtcctgaatagaattcctactaagcttaaggaagtaacaccattcgaggaagggaaaggaagaaattaaatctctcacaccagcgcacatggggctgtttggccaaggtaaatgtacctatagccaaaaagcgtaaacttggaccaaagaccgtagattgtgtgttctttggttatgctatccacggtgtgggatataggttcttaatagtaaattctggagtacctgacatgcgtgttggtacaattactgagtccagagatgctacattttttgagaatgaatttcctatgaaaaatgcaccaagcacttctagtcaagaacctattttatcccctgagcagtttgcaccgatagaacacattgatcaaatgcttgaggaaatcctgaggaggataacattgtagcaactcgaaagagtaagagacaaaggactgcaaagttttttggagatgactacattgtatatcttgtggatgatactccaagaaccattgaagaggtatattcatctcctgacgctgactattggaaggaagcggtatgcaatgagatggactcaattatgtctaatggtacttgggaagtcattgagcgtccatatgggtgcaagcctgtaagatgcaaatgggctttcaagaaaaagcttagggctgatggtacaatcgaaaagtataaagcaaggcttgtggccaagggttatacccaaaaagaaggcgaggacttttttgacacttattcaccggttgttcgcttgactacgattcgagtactactcactctggcagcctctcatggtctactcgtccatcagatggatgttaagacagctttcctcaatggagggttggaggaggagatctatatggatcaaccagatgggtatgtactagaaggtcaagagggaatggtgtgcaagctgttgaagtccttgtatggtctcaaacaagcgcctaagcaatggcatgagaagtttgacaatacacttacatctgctggctttgttgtgaatgaagctgacaaatgtgtgtactatcgctatggtgggggagagggagtgatcttgtgtttatatgtcgatgacatattgatctttgggaccagactcaatgtgattgaggaggtcaaggactttctgtccaaaagctttgaaatgaaggatttgggagtagctgatgtaattcttaacattaaactaccgagaggagatgagggtgggattatacttgtgcaatctcactatgtggacaaggtcctgagtcgctttggttatagtgactgcaaggcagctcctactccttatgatcctagtgtgctattaaggaaaaaccgaagaatagcaagggatcaatggagatactcctagattattggttcattgatgtacttagctagtgcaacaaggcctgacatctcatttgctgtgagcaagttgagccggtttgtttcaaatccgggagatgatcattggcatgctcttgaaagagtaatgcgctatctaaaagggacaatgagctatgaaatttactactctgggtacccaaaagtactagagggctatagtgattcaaactggatatctgatgctgatgagataaaggccacaagtgggtatgtgttcacacttggaggggacgctgtttcctgtaagtcttgcaagcagaccatcttaacaaggtctacaatggaagcataactcacagttttagatactgccacagttgaggccgaatggcttcgtgagctcctgatggacttgccgatggttgaaaaaccagtaccagcaatcctgatgaactgtgataatcaaacaatgattattaaagtgaacagttcgaaggacaacatgaagtcatccaggcatgttaaaagaagactgaagtctgtcagaaagcagaaaaactccggagtgatagcattggactatgtccagacggctaaaaatctggcagatcagtttaccaaggggctaccacgtaatgtgatagactgtgcatcgagggagatgggcttgagacccacttagagttgcacaataatggaaacctgtctattgtgatcagagatcccgtgaatttggatggcgaaacaaactattgtgtaactgagagaagagaccctaaaatgggcttatcttcatgatgcacttctcttctaatctgtatggtaggatggtatacaccttaatgtaatccgagtagcttttcataaagcagatatgttggcctacagaacatcttagaaggaacacacctatatgagtccgactgctagtcacagtctatgagatctggttgatctctagatactcatgaaaaggccgggagtatgacttatacgctccaaacagaggggatgcaaacggcagcctagtaccagttaagggtttgagtgaaacctgaatcgcacaagactgacaattcaaggtatagtccatttttcagttgtaatctggtgtagcttttttcctaggaggaagttcaacttaacagtctccaccgaaacactggtataacaaacaagatcagaatcgagagcatttcctgtgagccatgaaatttggtggggattgttagattaatgggctaagcccaattaaatcctaataaattccattggcccacattaagtgctatgggtaataataccaccttggaaatcgggtgaagaggtctcaacttaaatacggagttagtctctgttgaccggttgagatggtgcgcggacagccaggcgggcgaggcgaggcgaggcgaggcgaggcagacatttgctacactctctcgttttgtaacggacggtaataaatacggagaattgatttcgtatcaatgaacgcgtcggttacggaagtaaacgtcgtgaattgattccgtcggttacagaattaaacaccgtgaattgattccgtcggttatggaattaaatgccgtgaattgattccgtattaacgagcgcatcggttacgaaattaaacaccgtggttgatgactccgaacgttactctcgcactcgcatattatatactccgcagtgactagaaggacgggagaagttcttcccggcctctcttgcacttcgagttcctcctcctctgttcctgagctgcaaaatccttccccgattctgttcacctgcgtgcacaggtgtacgggacgagcaggtgcctccgaaactccatccgcttgagaacctgcacgggtaggcggacgaactgctcttgttcttcacggctactgctgctgcatcgacgccttcaccaagatgtcgacggagattggagacaagataatgaacgacatcaacggaggtagtactgcctcaaaatccagcggtgggacgttctcggggtatactttcattctcccgattctattagatgtttctttgttaatactcttcgcaatggcagtattgcgttactatgtaaatgttgatacttatttcatatcaagcatactcaagttgtatacatcttgcactgtcactagatctactcatattgcaaatgtcatgtttattgtcttaatattttggattaaaatatgccgaattatgactaaatttacaacaagaaacccctcttccccggcacgtaaaacgaagttcattttattgcatgattaattaagtattaactattttttttaaaaaaatagattaacatgatttttttaaacaacttttatatagaaagtttttatataaatcacaccgtttagtagtttgaaaagcgtacgcgcggaaaacgggggaagaacacagcaagaacacagccactcccgtgaagcctagagaaatcctggccatccaaacatacaaaaagagcgtccaagatttgacaaacggcccagccaaggcagaggacactcgccttgctcctgctccgctccgctccggcgccctgcctgcgctgcgctcgcgagacaccacacgagggcggcgccgcgattccacggcgtcctgccgcccgccgccctagcctgtttcctccccagcatccgccgccgcaggggagcatgaaaccctcacccgcttccaccaaagccccgctcccgtggatctccccgctccactaccgaagccccacacgcgccgcgccgccctccccgccgccgccgccgcctccgctgcccgaagcgcccctcacgcagctgcggtacgtccaccaccccgacctagcccgcctcatcgcctcctccccctccgcgcagcgcgcgctcgacctcttcaacgccgccgccgcgcagcgcggcttctcgcacaccccggccaccttcgccgcgctcctcgtccgcctcgcccgctctcgcctcccctccgccgccgccgccgtcctccgccgcgccgcctccgcgccctgccgcttcctcgagccgcagttcctcccgctcctccgcctcctcccgcccgaccactccctcgcgctcctccgcctcctccccgcgctcctccgccggggccgcgtctcccgcaaggccctcgccgtctgcctcgaccgcctcgtctcctcccgccgctgccccgatgttctcaccgagctcctggccgacctgcgcgacccccggagcaagtaccttccgcagcccaacacgtgcatctacaacatcctcatcaagcattacgtcaagaaaggcgatttggggacagccttccaggtgtttgatgaaatgcgtaagatgaactgcgctgatgttagaccaagcttagtcacctattcaacattgataggtgggctctgtcgtggggctcagatgaaggaagcgtttgaactatttgaggacatgatcgagaaggaccgcattgtgccagaccagctaacatacaatttgctcatcggtggattctgcaggctaggacaggtggagaaagcacaatcgatctttggatttatgaggaagaatgagtgcgagccaaatgccttcaactatgccactttgatcaatgggcactgtaagaaaggggaagtggaggcagcgaggggggtatttgaggagatgattagatctggggttcagccggatgctgtcagctatacctcacttgttggatgcctttgtcggcatgggaatgtggatgaggggatcaatcttgtgcaggagatgtggcagaaagggtgtaaggctgatgttgtcacatacaatctgctgcttgaggggttgtgcaaagatagacggatagcggaagcagtgaccttgcttgagaagttaccgtccgaaggagtacagctgaatgtcgcaagctaccggattgtgatgaattgcctgtgctcatgtggagagatggagaaagcggctggcttgctgggcatgatgctcggacgaggatttgtacctcactatgcagcatcaaacatgctgttgattggtctgtgtgatgttgggagggtatcagatgcaacagtcacattgtatggactggtggacactgggttcatgccagaggctagatgctgggcaaggctgattgagtctgtgttccgggagagaaagcttaggagatctattgagctgttggatgtgctgattgctgaagggtgaccaagtcaacttgctccagcatggattgttttgagtttttgactgatttcatcacctgaagggaggtgaaaaaccaggtattgagatgttccaataaggagtgatgacctactgaagccacataggtttgatagacatgggctgatgactgtgcaggagatgactgaagggatgagtgatttgcagcaggactgtgtgtgcaatcaatcttcactaaggttagcaagcaccaagcaatgaccagcctgacccaattcatgatggaatctgcgatcattccgaggttggggaatcttcggaaggtgccatgacacatggttactttgatgtttcatgattatgccaaaaatagtactctgtacatgattaataactgacaaaggaagctgaagtctgaacgaccattttgtggacaggtgttcattttccttatttgctggtgtgttcttatgaagggttactgactgcttgacaatggacatatctgtgtaatacactgtcattgtggaatccatagagatgtttcatggtatttgactgtatgcaagaaggaaatgtgcagagagtcaccattgtcatcttgattgtttgattatagagatccaaaaccaaagttttacacaaggccaaactgcaaagttgagaaacatggtatgagttcatgttgaaggcagagattcattcaaccttcttgattggagactttgcaatggaattatttctatgcaaatgtagagaatgtccaggagttcaggacctgctggcaacataaagaactcagtggcagctggcaatgtaatattacggttgctactcaggctaaaacaactcaataccaaattaatgcattgtccttgcatgagttcctgtttggaacagattatttaccggattattgctgtggattatctacttgaatatagtgctaccatgcatgtatgccataattatggattgttgctattttcaaatctgactaagtttttttgatgagttacagtgtagaacaatattgcactgcaaagtttcctattaacaatgctccttagctctgataatctgaaacctgaatttacttttttttctttatttacaaagttggagactggatatgaagagatatgatactttgatgctataatactttcagccttttacttaaattcttgatcaaaataatctatgcacttataacaccttactccttttctatttcataggtattcagcaaagatcatagttgttttctgaccttcaatggcaggaagcagtcctaaagcagtgcattgaggctgagcaacttgaaagtgtcaacatggctggaataaacctaatcaataaactaagagaagccctcaatgaacaggctttgagcaccttttatatgtttcttaaaaaatattctaccatggtgtggcatataatgatataagcatattattacattcataaatatttatgtttttttccttttatataacaggaaacaaagtcagagcttcttcgcaatcagttgcatgtaaggattattcttttatacattctcacttgttattgtccttgttataacttcatctttcactgcagaagcacaccttagattattctatttcttatattccatgtctattatcgcttaattactataatggaacatttaagggtcaaaattatgatgagcattttcatggatgcataagctttcgtattacagtgtctgcttgctttgagctttactccattcttgatgcctcagcctaagatgacccatgagtccatgatatgtgagcacaacctcagttttgctttgtcaagcacttccataaagtcataaacttaacttatctataagcgtatcctaataaaaaatttatggtcaaaaatcaaatatcatatattttaacgagaggaatagctcgtatcttcaccaatctgttctatagacaattccatgtgtagtactagtactgaaagacctcatgatgtcacaactggtagaaagacaatgagtgacaaagtatgcggcaaaataacggtggtacacaaggaatttgttgaagatttgtacttgtaaatttattttgtattgttgtggaaatttgttgtgcttaggctaaaacttggatactcggagaaattttctttagaactacttgactgttttataactagaattctacattgtattttacgcacatgtttggatgggtcatgggtgtgatctatataatggattgtttataaatagagatattatatttctaccactatgttacactaagttatccaaataaaaagaaaatttatccaaataaaaagaaaatatttaacgactagcatggcctcctcgtccagaagaacaaaaggtatatgatgatgcgaagacgtgtgctgatcctgtgtgccagatcaaatatcttctgcacacttaatcatatgtgacgcagtgagcaatagttgcggttgcgagaaggtggccaacgatcagttgtgaccagcggccattgtttaccagaaattttacggttcttgtacatttacataacttcttcctctataaagattactgtcattgcaatacatttacataacttcttcctctatgaagattactgccaatgcaacacaaacaagggctccagcagtctacccaccacggtctcgctccaaaatctgtggtagacgaggctactaaaacttagtcccatggtatgactgttgataggtttccacgtgcctcctatttccaacatgagtcagcttaataaatagtattagttagatatctcccgctccctttttaggtatttccattagcaaatggattgtaggatcaagcaagaaactgactctgactgctatgtggatatatagtttagtttgcatagacaggatgtataagggatgcaggtcatctgcagtactgtagcatctctgcattttctctttcaatgcagaggatcccaatccaataagaactcggtaggcatcttgtagtgagagatggatagagattaaaatgagactcggtaggcatcttgtaatgagagatggatagagattaaaatgaggcaccaacaaagctgtacacttcattaaaattagccacctttgccatccatccatgtactcggttgtctctctaactagttgatatcccgagcttctctaactaattgatatcccgagctttgctgcaagatatatggatgaatgcacgttatacattatagaaattgtagatgtatgtgtttaaataattgaaaaatattatgaagataatgatttgacatttcttgcatattatcatatttttcaataattgtacatattatcacgtaactttgcatctattttacgtcaaaaggaaaatgttgcatctgctgttatcggtgccaatgcaaagaaagaaattaatgttccttcagctttctcggcaaaaaggcaatacaactttgcaaaggagaaacttgtttaggtgcaaatattatgttatcatgtacatgtcaattctctagtccatctagaacaaaattgctagaatcttcaacaaaaacaagccaacattgagctgtccatcgagcagcaatcctgcaattccgacacgacaacaacattcctagatcttccattcccatgtttgtatgcacgctcgtggcttcgtgcatagtagtgcgagcattcatcgtgtgtacatacacgcctaccttgttgacagaaaagcttacctcctctttttgaaagagccttgtatatgaaacatataaatgcatccatgaactctttcagatatactcctatatgagtagtaagtaggagttgatattagagtaacatcgaacacctagaataatgtccttgctgcagattggtataactaaggctgtgtttagttccacactaaaattagaagttttaagaaaaaagttgaaagtttatgtgtgtaggaaaattttaatatgatgaaaaagttgaaagtttaaataaaaagttgagaactaaactcggcataagccacatgcagtagtactacttttgtaccaccatttgttttggagctagctcttgcttttgtactacattgtatcttcgccaatcttgttctacaggcaattcattgtatgccagtgaaacataagttttttacaaggtatttatgcaagggtaacaccatagaagcctattaagttattacgcctaaactatgaagcaggtatatatttacagatgtatatggatgttgtagaggcaattcattgtaagccctctcaaaaaaaaaattcattgtaagccgctcaaaagtttatcttttcggttagagtaaatttaacaaaactataaatatattgaccaaattatcacaaaactacatatttaaaatggtgtatcacaaaactagctataggtttagtgtcaatttaattacaaaacttgaacatttataactcaaccataatattagtgctaaggatttaaaccccaaaatatatagttttgtgataatttaattattaaatatataattttgtgatacttagagttaaacctgtagttttaggataaatttattgttaaatctatagttttataataatttgatcaaaatatctataattttgtgaaatttactcttttttttgcgaggagaaatttactctttctgttataggctactaaggtcactttttttagacaatataactacatggagtatatggtaacatatataagttcatttttccccatcttgaaaatcaggatctgaggtatagaacctacataactcaccagaaaatagctttttcttttagttggtaagttttcacgggagtgtacgtagttttatatttacaaaacaacaacacctcctcccccactcccaactaggggtgggcaaaaaatacccgaagaccgcaagccgaacaaaatcgagccgaaccgaatcgaagtgtcggtttttttaggcatcggtttacccttcggcatctgttttgcgtttgatcggtctacggtcttttaatttctatggtttttaattgtcacgaaccgaacaacccgagaaaaccggagaaaccgaaccacacgtacacagtatcacaacaaattaggcaacgtgcaagctttaaggcccaacatctctttaatggggcccaacatctcctaagctacccatgtctcaagccctgtttattatcatcacgttatcgtgcgaagccacggctgtggcctcatggcaacgtgttccaacggtttgttcagtgaaccgaagttactccgtttaatcggctcggttttcttttttatatagattcttcggttgcaatagaaaaccaaaatttattaaaccgttgaaaccgagctgaattaaccgagtaaaccgaacgctcacccctacccccaacccacacatacaaacgcacacacacacatcaatgttctctgaaactgatgtgaactttctaaacaatacggttcatctcctacctccagaaagtatttggcatgtcgatcagggattgcaatttcagttcaaaatttcaggcccccttgctggcaagcgattattttagtcgaaattttcggttttctcaaatttttgcaaatttggccaaaatttagttaaattcagttaaattatgctaaaattttgagaaaaaaaaaaggtccaaaaagtaccaaaatttcggatgaaatcaaaattgaaaaccctagtgtcgatccattagctcaattaccagcagctgtcactttagaagaatgcagttcacattcaactagcagcaacgcctcgagtgaaattcaaccccatatatactgagataccggccaagacacatgttagcacattagtatatagtacaactgctactgcagctatccatggttcaagtactaataggaattccagttttttcctgtttgatcgattcctgctgcgagtacgaggtggaaaagagttacaatcccacggtgtcggctcccagagcttcagtagctgatgctatactaaaacttcgtcgattggtgccacagctgatgggattccacatgcctcccatttctagtgttgctcaagttggtaaatagcgtgtgtttcggttactattagcgaccaaattaaaggctggagcaaggaactgatgaccgatatgtacatatgtgaagaggatatatatatacatacatagaaataattaagcatgcatcttcaactatagtaatggatgaggagtttcggcatgatgtactatgtaaacagaaaaactactcaaccatatcccgtggaaatggaataagtaggtaacgctttgttcttatctatttgccttctctctccgagtcttcgtcttcctcctccgcctctcctattttgccctccttttccccttcccctcctctctgttgcagagagctcctctatgaaggcatggcaatggcgaagcaggccccccgaaaacggatcccctccccctcctcctcattgctggttctaccctgagtgcatgttggttacaaggtcatattgcctcctcctccgtctcaatcttttgaggcatggacacccactggatctagctcccatggcggaagggggaaggagggaaggagggaggctgtcgagaaggatgctgaccaacgtgggtttcttggcctcatccttcaaggcgctttgctgatggtgatggagctttcattcgcggcgacgtgatggcgagccaccatgctcattgccggagtgtgtgcaagtatgttgtgcgatgtatcatccacagtcggtaccccataggtaccaagtttgatacatgtggtattaccgctgatacccaggtatcagacccagtacctgtaggtaccatgcttaatatctatggtatcatggctgatacccacaggtattaaacctgatacctggtacctgtgaggtatcaagtatcatggctggctgcgaggtatggctagctacgaggaatcaagcaccacatgccttctctccttttatcccttcccctcggctccatccttgtttcctactactgctgcaaccgatgtcactccttgcatcgccaagcgttggttcaagacgtggagggagcaataccaaggaggagcttggaggaagagggcactgtctgctgcttcggctagctgcgagtgtgctccaccgacaaggtatcgcgtgtggaggcgcgtgagaccgaggaggatccgtgtaacgccccgattttcgttcaggattaaaaatcattaaataatgcattttctagaaattaaataaaagttaaagcaatttaataaagtgaaataatgggagaattaaaatttcctttaaaaatcattggccgagaatattttgtaatattctttgtgccctaaaatactctctgaaatttcacgaattttcggagctcgagaaataatttgaatagcacaaagttcatttaaccaatctctactacttaaaaaataagaggtgcttccatcgtccgtcaaaaaaaccgggcgaaaaaaaccaagtttgtccgatccaaaaaaaaccaggcgaaaaaaagtgcgaaaaaaaaaccaaatatgtccgatccagaaaaaaggcaaaaaaaaatgggcgaaaaaaaaaccaaaatttgtccgataaaaaaaaccggcgaacaaaaacgtgcgaaaaaaagaaaagaaaaaacaaaatagcgacaaaaaaagtccgagtcggtccctaaaaaaatagcgataaaaataaaaaaaagtttgactcctcttgttgcgattcaaaaagtccgactctagatccgaatcccacttctctcagattaagtccgagatactaggcaccacttctctcggtttcaatctataccattattccatacatcttggtgaaaaaaaattgatgtgctggattgaagatctgtttgcaaaaacggaacctacatatcgagagcattccatttttatatgattttaatttttgggtttgtacatttgtatttgagtccctgtaatttttatatttgcatttgagtccctataatcttgcaataaggtgcttttggtcttttttaaaaaaaacaataaataaaagggatataacaaaggtagaaaggtgcataaaaagaaaaagaaaagccacacaaaaaagaaaataaacaaaaaaaacaacaacagaagtctatttcccctaagtggcgaaaaaaaactgtagatgcaaacgggaaaaaaaatccaattcctataaaaggcaaaaaaaaaaaactggtgaaaaaaaacgctagatccgattcctttaaaaatggaaaaaagtctgattcctgtaaaggcgaaaaaaatccgaaaaaacatctaaaaaagtttgtccgattctctaataaagtggcaaaaaaatggttcgtaaaaaaaaaaagctggttcgtataaaataaaaaatgcacgcaagaaaatatggaaagggcgaaacaaagtccaatttctaatcagtataaatctcttctctatctctaatctaatctaactatttaaaaataaaaaatgcatgagaaaataaaaacgatcaaaaagacgtgtgagaaaaaagtcagaaaaaagcgcaaaaaacacgctgaaaaggttttttttccatcttcttacaaaataaaaaaacacgtgtgaaaaattatttccattgccagcaaaaactttttaaaaaaacatacgaggaaaagactgtcagaaaaaatgcgtcatttctaaaaaaaaatggtttaaaaaaaccacgcaagaaaaaacactatctattaaaaaaaccgctctgaaaaatctgtcagaaaaaagctaaattgatggacgcttgagtcgggtaggatccatcaattttttaccatctactacacggcttttatttcgtcatatattctcatgtattggaaaaaagcaaaaaataacatttaaaaaaacaggcaaaaaaaaccacgcgagaaagtaattgtcagaaaaaattgacaaaaaaacacgcgagaaaagcaaaacaaaaaagaggagaaaaatatggtttttgtcatcactaaaaaatggaaaaaaaaacatgctaggaaaaaactattagaaagaaatgcgctatttctgaaaaatggtttgagaaaatcgtggaagaaaaaaaaaacaccgtttataaaaaaagcaagctgctcattaaaatacaaacattgtcttcacatgattatgcatgaaaaacgtatattatcattaaaattttttcacccattgcaacacacgggcatttttgctagtttaataaaaagaaaaacaatcaaatctcccctccttcaatttgggccacttccggcccaaagccctccttccctccctgcggcccgtcccctcccctcttccttccttcctccttgggccatcgacctatcttccttcccctcgcgcaaagtctaaataaccccctgggttctcctccctctctccctccccgacaggtgggcccggcgaccccacctgtcaggccctcctcctaccttcggcttcccaggccgaagccgccatggtcggcggttgccgcccacgtcccgccaaatccggcgccctcccgctcgcgccctcgcacccaaaccaagtgaaaccggttcccctccaactcctccacattttcccccacttttccccaatttttggcgccaaattgagctccacttcgcccacgtcggcatcccacgtcgccgcctctcccgcgcgtgcgtggacgcggtcgtcgcccacgtccgcgccgttttcccccactctccccgcaaaatccggccacgtcgccgcctcccacatctctctctctctcccccacgtcgccggctggtttccacccctctcgggcccgatcccgcctccccgagccctatataaagcaccctcgtgctcccctcttccgtttcccccctccaccccgagctccctgcgcttttccccgctctccccacgctgctccccatcgccacccacctcaggcgagctccggccgccgtttcctgtcgctagggccgccgccaccttcggcatcaccgagccaagccctacctcggcatccactctgtttccccattccattgtcggaattccatctccaccatgaaaccgagccgccgccccttccaccgcctccagctgcccgccaccgccactctagccgctgccgcaccgcgccgatgccgccttcgggttcgccgcatcgtgccacgccccggccgccactccacccgtccattccatcgcccgaggactgcttccaccatcgacccgagctccaccaccgcctgtgtcgcctcaagccaccactcctcaccgcctcagccatcgccacgcaaatccgccgccaccctcggcttcgccgcgctgccccgcacaccggccgccactccaaatccccaaacgatcaccggagccccggttcagccgccaacccgagccaccaccacctctaccgcctccggcggcctctcctcgctgtctccggtcgccgcgcgcggcctaatccctctctctctccttcctcgggccaagacgctccccgaccgccccctcgcttgccgggccggcgccgccatcaccgtggtcgtcgtcgtccttccccgcgccggtcatcgtcatctcggtgagcatctccctcctcctccccttcctttcttttcctctctttgccgcactggccgccgcttgcacgtcgccgccatgcctaggcaccgctcgccgccgcagcccgcgtgtgccacagcttcccgcgccggtggccgcgccgccgctcgccgtcgctcggccggctggcctgagccgcgcccgtgccccagcgcgccaccccgtggccgcccgatcggcttgggtcgatccgggccgtcggttcccgtggaccggcggtggaccgcctcggtggtcccagaccacggtggaccggcgcccttgtgtcgctgaccggtggggcccgcttgcttgcgccgcccctcccccttgatgacgtcagcgcgtcccttttcctttgagaaaataattaataattgcacaataattcgttaataattctagaaattcatttaaatggctcaaaacttctaaaattcatatctaattcattcgaactccaaattgggccattcaacttgctaaattcatctaaaattgagatctacatgtttgtttactttttatgtactgtttccctggtttttattagagtttttcctcgttgtgcatgctagcgtgtagaatccgttgttcggaagttcgcggtcgcaaggatcagagttcagaaggttgaagtgaagaagcaaggcaagtcacacattccccttgagcatattgagcctactttacaattgttttactatttgcaaataaacatgcatattttgctaattacatgggatctgggtattacctatctgcttgcttgtgctatgtttacttgatatctgtcctttgtcaaccttgggtaataaatcaactagctcatgttacttatgtgacctagctggaactatatgcttagccatgcttaattaccactagctcagttgatgggataattacagtattagaccatttcagtaacagaatgagctgcgtgctcgagacatctggccatgcttcatggtcgtaattatccaactaaaatgcgactaaatggtgggctgtaggtgcatggttttgctagtcgcacccatggcaattaaggaccggttcgcgggaaaccttggaagaatttatcgtgcttaccacaagccaacgtgggcaacggctgggcttgtagtgtagctttcctctagccgacgtacccaggcgagggtgggcgtgatagagttgggtcggccggggtgtccggttgatcggcttccggattcaccgcggcacgagagggggctgcccgttgcctgctgggaacgggggcgaaccctgaggtgtggtgcgatcggttagagggggttatgagaagggtcctgtcacggcctctttccggtatgtcgtggtggcatgtcggcgcacggaaacatatcgtggggatttgtcttgtgggtacagttgtacacctctggccagagtaaaactattcgaatagccgtgcccgcgtgcccgcagttatgggcagtcgaccagattcaccgtgattagtctcaccttaataaatcgactcaatgcactgtagttcaggtgggttggttgggcctgttcaacgtggtgcagcgttgatcagtggaaatttaatgttattttaattactcaacagttttactattttactcaataaaatattttacaaccgcctttatacaaatagccacaaaccgtccttgtgttccccttacatgtctgcatcattggtgtggcttgctgagtacggtggttgtactcagccttgctattattcccctttttcagaagtgtagtgcttctgagctagaggcaaagttagaagaccaaggctcagaccccagttgagttttgcctgtggagtggagctgaagccctgctaggatcgcctttttcgctgatgctgcttttgtttcggtgtgagaaataagtgcctcttctgtaagtattttatgctttatttacgtttggaactgtttattacttgtcgttttgtgtaccctggctagtcctggacagggatttaatacacaaaatagtctggaaatttgggctaaatttctgggcgtgacaatccggctggggaaagcaacgaggaatcgcgtggacaccaggtgacgcggttggaaatatctattaatttatcaagttgtttaattatctcgtgactttagtcttgaacggcatcccgtgcgctagctgccctcttttagaaatatgtattacgtaaataataggtttgaaatagtcttggtttgcctcttaatgctgaaggaatctggtgtactatattggcttgtgtacaaatctggtacatgacaacactaatgtggaaaagatgataagtttggagcaagagtagcactttggttgaaggtgcgctgtgaggccggtacgtttggaaacttggaattattttaaaggtcaatataaagtaaagtgacaacactaagggaatgcacggcatcacgccgcgcgcagccatgcacacaaacatcacttaagcaaaaattttattaaacacaaattagctatcattgataagcgttctccatttaacataatatcaaaacgtagtactccctccgtcaaaaaaaaaaaaagctaacctagaaggggatgtgacccctctacagtaaatctggacatagcaaagtatacacaatatatatcaacctcccatgttatctaaccacacacattttgctagctgtaaaggaggatgaacacctgcaaaaaggaaataaatttcctagaaacttgaggaaaagagaataccaaacccccatcagacaactgataatagaagcaatggtacgtagcaagataaaaagcaaggttttaacatcattgcctaaatgtacccaaacatatttatttgaacttgtgtttaagcctttatgctgtaattgttttggacgccctaaaatatccagtgaacaccaggtacctcggcaactcaagcaatagtgaatcagctctgtgcacactccaaatgatgtaaaagctccttcaccaatctcatgcatccgaaatcatttcaaaaattcgaaaagtctgcacgtagaatataatcatttgtgaataataagggaaagataacaataacactaaattgttgggagcatcggagctaatatcatgcatgctagactaaaatcatggtaaagaaataagaacagcggaacaaagcagcagaatggtctctcttaatttggattaccctttcctaataaagtaaagagaaacattttcaagattcactaggcttgaataaactaaatcaactaacatacctgagtaaaccagaaacaatttattaactccatatgaccaatctatatgttgtagcagggggctaacacctcttcctcccattcggtcaaaacactggagtaaaagaggtgttgagaattctaagtgtccgaaagggaaattaccctttcgaatggtaaaacaccttttcaagtggaagaataccttttcaagtaggaaaacacctactcgagtggtgaattaccttttcaatggtaaaatacttttcaaatggttttatgttgctcagttaacttgagcgaactataatctatgtcaggtaagttccaagagcaaagcaagtggtaagaagtgtttgaactttcaagatagaaaaggcactcaacacaagggctcgaggaagaacactacttgagtaagggaagatgctaaaagaagattctgtgaggaccattctcaaccactcttgccagctggcgccaaaagactataatgacctacaagatgtaccaaaatgcacctagggttgacccgcgggggcaaagatgtaatcttgcatgtacgaccatgggctatttaagccggtcaaaatcctgtagcgggacaagagacattttataacacaaaagtaatcaccaaaaggttgtgtgtactgtttgagctctctaagaataggcaggagagttcctttttccgcctatccccaaacttggtcacgacatgatacaaaatcacaaagttcaacaaatggtatgtaaagcaagaacctcatattttaactttatttttggatgattcaatacttacagctgcagagtcggcagagatgcccatgtcttaatttggattaccctttcctaataaagtaaagtgaaacattttcaagattaactaagtttggataactaaatcaactaacatatctgagtaaactagaagcaatttattaactccatatgaccaatcgatacaaaatcacgaagttcacaaatggtatattacgcaagaacctcagattttaactttaatttttggattattcaatacagacagctgcagagtcggcagagatgcctatgtgcagggcttctatacgttgcatatcgagtttaacaaccatgttaggttgacttgatttgaacacaatctttatggcttcagccacctgctcaacacataggctatccatccatccatccaaaagttaagatcaccataggtcaatagcagcagggcgataacagctcaaatgtcaacgatgaaattgaaaagcattactaactgtaggatgaggcaagtacgcaaatactaccccataattcagacaacaaatccactcaattctgtatatatctaatttgcattgcacatacttagtagacctagataaattcctatgagatctccacaaatctgaatttcaactacgatttccaccatacattgcgatctccttccctcccattctctgatttggtcgtaacttgctttacgtcgagtttgataataaaggttcataacttattccatccgcatggaaaacgatgttgctcattagcatatgactaactaaatattagcttaaaacttaaaaatagattattatgattttcaagcaaatttattttttttgcaaaaaaaaacagatatcatttaacagtttgaaaagagtacacatggcaaacgatggagtataagttgggaaaggtgagtgcccaactcagctttatgctgtgttctttttcacacgcatggttcccaaacttctaaacagtgtgcttttatatatatatatatatatatatatatatatatatatatatatatatataagttgcttgaaaaaaatcatattaatacattttctaagaatgtttagctaatacttaattaatctgtatgatcgaatcacaataactaagctaaccagaggggggtgaatggttggtatacccaaaaaccgaaaacttttagcggaaataaaagttaccctcaaattcaacggatcgcagtctgaccgaaattgtcatgttggtctgaccgcctggttgccatcggtctgaccgaggttgaatctccggtctgaccgccgagatcagctcctgtcacctgtcgccgaagccggtctgaccgccgtgtccccgccggtctgaccgccgcgatgcctccggtctgaccgccggtgcgccaccggttagaccaccgaaacctggtgaaacacaaatcgaagaactcttaaagtagatgacaactttattggttctctccgtatttacaaagtgcaccaacaacactccttacaaaaatttcgacaaaactcaaaactctaactcaaaactcaactcaattgctctcaaaagcgataccaggaagcctcacgctccccctctatttatacccgaggtaggcagcctaaagccacgaaccaaactcatactagaagtcctaaacaccttaggaaaccctcaagtacaagaaacaaactttacataaccaatcatatcaaatttggactccttccaaattcgactccgcatcccatacgcacacaatacctccatcgtatgccatatggaatcttcaccaaccacatgcatcaactctagcctaagtatcccgcatgatctctgcccaccacggacgtcgtcttatccccaagccgactcccggtccatcaccgcaaatactctcccgaggcatcgagtcacctacacatgaaataaacaaagaaaccatattccgagaccaaagctatctccaacttgactcatcgttagcaaacaacagtattacatacgcatagtatccatctagaaaccatagtcatgaaataatcacagatatccaaacaaacaacccgaaaccgaaaccaacacagagtcggccggccagaccgcgggctggccggtctgaccgcgcgcataccgccagtctgaccggcaacccttgcctggtctgaccggtcacataaaataataacacctgtgattcacctgtaaatccaatcatctccaaaaccacttcgtaaataaattccaaataacaaaaccaataatctctaatgccaattgttcatcacagaataataatcaaaaacacctttgattttacataatcatgcgctaatccgcgtatccgttttacgtgtcggaggggaaggttcccaattccaaccctccttgccgaactcagccttagtttgcttcttcacaagtaggaatatctccacgaggtggcattcctgttgacatgatctgttcagaaaaatcaaaatatcacacacacactgaccatagcaatcgacataatcagtaagaaacaccaactaaaatcagtatgcaatggcgatcagtaaacaacaccaactgaaattagcacgcaaccacatgatcagtaagaaacaccaactgaaatcagtatgcaaaggcataatcagtaagaaaaccaactgaaaccagtatgcaatgacatgattagaaagcaacagcaaataaaaacccactttgtccacttgtcagtataatgcatagtcatgctgattgcaaacacggtgtccctctcatcctgaaaaggataaggtcatgctacagattgaaggagaaacagaacaggaaagattatatatcccagatttctgttatgtacgattattatctctaatcatcttagttcagtaaaaactctacaggtcacatgcactgaccaaaagtcctgtacaggaaactaaaaaccaagacagtgcacagttcagagttcagaattctactttattggtcaactttgtttagagttagagttgttcatagcaacttgatagtgaattcatagccaagcagataattcacgtccactaaaaaatagatatcttcacaaacaactgaagtggttagagatctgcagagacaagacctcatcatcatgaaagcacaataaaaaatggcatggacagccataaaaaacctctgctagtttggctctttttgaagctcaagaaagttatcgaggatatacatctacttggttcaatgcagatcaagaaaatgaccacggatatacatcaccaagtagactatgtgtataatggacgggagcagaccaaatggatataagtataatccaagctgagagcagtgttaagtgaacagccatataatggaaaacaactttcatgtttgattcagagagcacttttttcgttgggaataagttcttccctttccttttgtgtgaacagctttgtttcctgaatagtcaatgccactgttgtttcctgccagcaaatcttttgaaaaaatcttctgaataaacaacaagcacatgtttagaaaaataaaattaccaacaaaactttaaataagatgtccacgtatatgtgcggggctctcgtcctacttatattaaagtgcctagaaaagtcattttaaatggtattgtcgaccttttgcaaattatctgagcacaattttcttcgtaagttgctgcttgaaaaatgaacttgtcagcctttacctaagaataaaatctgtagattaagtccaataaaaatgtgggtcactctgtatgttacccctcagtgatttaactacacgctaaacaaccgatcatcaacgagggtttttcttcagcgatttaacagcacgctaacaactgtgacgggccgctggcctccgtcacatagaaaagccgttcacgacgagtcgatggctgtgccaagatcgttcccaacgcctcccattcccatgcctgccttcctagttgggactcgggagcaaatggaaagcttaaccagatgagcagctatggacgtctgattattgagcagcacagcacgcatatagttgctggggacatctcttattgttagctgatctgtgctaatgctagtgtagttgtgtacattgcagcggcgtgcctttgttcctctggtactcttttggacgtcaaaggtgaaggtaatgcccttttcctttattttgtagagaaagtagatatatactccctccgtttcacaatataagtcattttagcattttccacattaatagtgatgttaatgaatctagacatatacatctatgtaaattcattaacatcaatatgaatgtggaaaatgctacaataacttacgatgtgaaacggaggaagtagaacttatgtaagctcgtgtcctccttacgaaaggtcttgtttatagaggaataaatgcatccatcaacccgagcagatgaatatataagtagagtttaatatcgttgtaacatggaacacctgtggcaatatccttccagcagatcaatacaattcagccgcatccagtacatctgtactactccctccatcttgaccgtattactttctcatcaagaccaagaagagcactaacttctttctgattcatttaatttgatcacttttgttcctaatccttatttttcgtgagaccttctaagttgctctttattggtaatattttaccactgcttcctccgttcaacaatgtaagactttctagcattatccaaatttatataaacgttaatgaatctagacgtatatataaaatatatacattgatcaatgaatgaatctaggtaagataaaaatgttttacaatatgaaacggatggagtagcaacggttcgagctatcggtttataaggatgcattggtacttttcatgcttaaagaacctttaataataaaacaacaaaataaataaatacttaattcctcatttcacaatgtaagttgtcggtgacatgggaccgggagtatcatgactagaggcttgggcagccgcgatcacccacgtggcccgacccccccgagggggtcgggtccgagggtgatgtggccgcccctccctttgtctccccgaggggtcggactgctcccgtttcgaccccgagggccggggcgccccgaccccctgtgggtttggcgccacgtatatgggttaggtgagcacagcggggctcacctaaccgcatttattgcgggttggacgagcgcgtcacgccgcatgtaatgcagcgcagcgcgctcgtttatccggtccgtgaccgggcgcagcgtgtgaccggtcacagaccggtcagatcgcgggttaggtggtggcaggtggcctgttacacgcctcgccccgtcccgttggattgatgagagcctccaggcacttgtccctagccggagacggcgtgccagctcctgaagatggcacgtcggtcccggtcagatatatgccaggcttcatcccaaccattgcaaggaagtcattgtatgaagaagggcagacatgcagcttgctaaactgacgcgtggtggacgagagtgaccggtctgtgactggtctgacgcctgtcatgtcatcggcaaacaaccgtgcttccacgttgcacctgcttccgacggagtggaggttggtatgacccatcccatcggagggtcattcaaacagcagccattgcaaatctccgcccattaatgagggaggacagggctatcccggtgtcaggtaaaagtgcgagccaaatcttgctcaaagtaggatgggtccccacccaaaagaagggtaggtagaaatggtatatgtggtatccccttgagatataaaaggaggaccatgcctaccaagaaaagggaagaaaaaaaaaagaaggaagaaggagagaggggagctcatagaaaggacggggaaaaagagtagggagagggtctctagagttgaaaggctcttgctcttcagctctttgtaactccttcagagacagatccgccagaacacaggagtagggtattacgcttctcagcggcccgaacctatctacatcgcccgtgtcttgcgcgtttgctctctcgcgaaccattccacagatcaagggcttagaacctcacttagcgcccccggccgaaccggcaaaggggggcccgcgcggtctcccggtgaggagccccacgctccgtcatctggcgcgccaggtagggggcgcgtgtgtttttctaagctctcatcctctttcgtgtgcgccaagcttttcccgttcagcccaatggccgaacgagcaaaagcgcacaacctctctccgagcgctagcggtgacgacagcgagcagaacccgcgtcgtcgagctcgtactccgccgcccccctctcgccgaagtcttaggcgggaggaggcgctcgagggggtcgaaagatccgcgacttcaccgcccacgagcgatggagaaggacggcgagacggggagcgtcgtctcctcgtctacggtgatggcagcacgccccagggcgtgctccaggctgcgggcgcgctcctgcgtcacccgcccgtcgtccctgatccagagactccaactcgacgttggctagatgacgtggccaacttggtcatgacggcgcagcagcgtttaggcgccggcgggcggtcctccgccaccaaggccactggtgctgctactgccggctccgtgtcgtcgaggcggagggcgcggcgagcggcggccgttgcccgccgttcgtccgccattccctcgtcaatgcctccgacccaagaagatgtgcgtgaggggccggatgcccgcctcaatatcgagcgccggcgcaatgatcgtcgtgctgcccacgcatcggagggcgcttcctcgtccggagcgccacttcggtccggacacggaggccagccccccgtgtccccggttggcggtgccggctgtcgagcctttgtggcgagccttcgaaacgtccgttggcccccaaggttccggcccaccatcaccgaaaaatacgacggaagcgtcaaccccgccgagtttctccagatctacacgactgggatcaaggccgccgggggtgacgacagggtcatggcgaatttcttccccatggccctgagaggacaggcgcggggttggctaatgaacttgccacccgcgtcggtccactcttgggaggatttgtgccagcagttcaccatgaacttccagggcacatatccgcgcccaggtgaagaagcggacttgcacgcggtacagcgaagggacgatgagtctcttcgctcgtacattcagcggttttgtcaagtccgcaacaccataccatgtatccctgcacacgcggtgatctacgcgttcaggggggacgtgcggcacaaccgcatgctcgagaagatcgcctccaaggagccccagaccactgcggagctttttcagctcgcggaccgtgtggctcgcaaggaggaggcatggacctggaactccaccggttccggtgtggcagcttcagccgcccccggatccgccgctcggtcagggcggcgggacaggaggaggaagaagaggtcggcccattccgacgacgagggtcacgtcctcgccgtcgagggcgcttcgcgggccacccgaaaggggaggcctgcgagtgacaaagagaaggaggccggcgctcccagcagggagcgcccgaccggcaagtggtgcaccgtgcacaacacctccctccacgacctcgcggactgccgcgcggtcaaaagtttggctgagcggacgaggaagtgggaggaggagaggaggcaggagcgccgtgagggcaagtccccagcggctccctctggcaaccggcgaagtgaggccaagcagaaggcccccgccgaggacattgacgatggcgacgatgacctagggttccaggagcctggggccaccatcgccaccgtcgatgggggagcatgcgctcacgtttctcgccggagcctcaaggccatgaagcgagagcttctggccgcggcccctacccatgaggcgatgcggcgggcgcggtggtcggaggttgccctcaccttcgaccagaccgaccacccgccgtgcgttgcccggggaggacagatcgcgatggtggtttcccccaccgtttgcaacgtgaagttggggcgtgtcctcatagacgggggagcagccctcaacatcctttcccccacagcctttgacgccatcaaggccccggggatggtgctccggccgtcccagccgattatcggtgtgacgccggggcacacttggccgctaggtcatatcgacctcccggtcaccttcggtggatccgccaacttccgcacggagcgggtgaacttcgatgtggcggacctcagtctgccctacaacgcggtcctggggaggcccgcgttggtgaagttcatggcggcggtccactacgcttacctccagatgaagatgccgggccccggtggccccatctctgtccatggcgacctcaaagtcgcgcttgcttgtatggagcagcgcgcggaccacctcgccgccgcgtccaagcccgagggtggcgacgagaggctcggcacctccgtccccgccgccccgaggcagcggatgatcacgtgcgacgaggtcccggtcaaggaggttgccctgggcgacggcccgtccaagaccacacgaatcggtggtctgctggacggcaaataggaagacgcgctcgtctccttcctgcgagcaaacgctgacgtcttcgcatggagaccggcggacatgcccggggtccccagggaggtgattgagcaccgtctcgccgtacggccgggcgcaaggccggtccgtcagaaagtgcggcggcaggccccggaacgtcaagccttcatccgtgaggaggtggcgcgacttctggaggccggattcatccgagaggttatccatccggagtggttggcgaacccggtcgtcgttcccaaggcgaacggcaagcttcggatgtgcatcgactacaccgaccttaacaaggcatgtcctaaggatccttaccccctaccacgcatagatcagattgtcgactccaccgcagggtgcgaccttttgtgttttctagatgcatactctggttatcatcagattcgcatggctagggaggatgaggaaaaaactgcattcattacccccataggaacttattgttatatgacaatgcctttcgggttaaagaatgcaggtcctacttttcaacgtactactcgaatttctttgggtagccaaataggacgtaacgttgaggcctatgttgatgacttggttgtgaaaacacgcaaccaagagaccttactctcggatctagcggaaactttcgaaagtctccgcaccgcccgcataaagctgaaccccgacaagtgcgtgttcggcgtgcctgcgggcaagcttctcgggttcttggtctctgctcgaggcattgaggccaaccccgagaaggtacgagctatagagcggatgcgccccccagcaagcttagggatgtgcaatgtgtcactggctgtatggccgccctaagtcgattcatatcgaggctgggagagaaggcgctacccctatttaagctcctcaaacgctccgggccgtttatctggacggacgaggctgaacgggccctcactcagttgaaggcgtacctcagttctcccccagtcctggtcgccccggagccagatgagccgttgctactttacctggcggcaaccccgcaggtggtcagtgcggcgttggtcgtggagcgcgacgaggacgaccctcgctccgcgcatccccaccctgtgtcgactcgacccgggagagagcagggaggagaggcccccgagccgaacggtggcccaaggcccccgacgaccggagctggccctccgcccgcttgtccgacggtgccaggcgcccccgacccccaggatggccacggggccactgcgggaaggccgcgcctgtcgccctccgaccccgaggtcgtcggcacagaagccgagtgcgccccgcgaggcctctcggacgaagagcgccctggagatgtggcccctagtgaagaagatcggccccgccgaaaggtgcagcggcccgtctacttcgttagcgaggccctccgggacgctaagacccgataccctcaggcccagaagatgctttacgctattctgatggcttcgaggaagttacgccattattttcaggcgcatcgggtcacggtagttacgtcttaccccctcggccaaatcttgcataaccgagagggtactggacgggtggtgaaatgggcaatcgaactctctgagttcgatttgcgctttgaaccacgccacgcagtcaagagccaggccctcgccgactttgtggcagagtggaccccggcccctgagcccatctccgtccccgaggccagctcgggcccctcgcagctgcctcacaccgcctattgggtgatgcagttcgacggctccctgtctcttcagggagccggtgcgggggtcacgttgacctcgccgagcggagatgtcctcaaatacctggtccgcctcgactttcgggcaaccaacaatatggcagagtacgagggactccttgcgggactcagagtggcggctggactggggatccgccgcctcctggtgttaggcgattctcagttggtcgttaaccaggtctccaaggagtaccagtgctttgacccgcagatggatgcttacgtgcgccatgtgcggcgtatggagcgccattttgacgggatagagcttcggcacgtgcccagacgggataacacggtcgccgacgaactctcaaggctcgcctcctcgcgagcccagaccccaccgggcgcctttgaagaaaggcttgcccagccgtcggcgcgacccgaccccctaggggagacggacgcgcctgaacggcccccgaggcccgtcggagtccaggcctcgggacccgaggggagcgctcccagctcccttagattgattgcttggatcgctgagatccaggcgtacctcgcagataagactctacccgaggaccgcgaagggagtgaacgcgtccagcgcatctccaagcgctacgtactggtgggagggaccctctatcggcgcgcggctaacggagtcctcctgaagtgcattcctcgggaacaaggcgtcgagcttcttgccgatatccatgaaggcgagtgcggagcccactctgcctcacgcaccttggttggcaaggcctttcgccagggtttctattggtcgacggctctcaacgatgcggtcgacctggtccggcggtgcagggcgtgccagttccacgccaagcaaacccatcagccggcccaggccctgcagacaatacctctttcatggccgtttgctgtctgggggctcgatatcctgggtccgtttagacgggccccgggcaggtttgagtatctgtatgtcgctatcgacaagttcactaagtggcccgaggcttatccggtcatcaaaatcgataagcactccacacttaaattcatcaagggcatcacagcccggtttggggtgcctaaccgtattattacggataacggcacccaattcactagtgaactcttcggtgactactgcgaagacatgggcatcaagctctgcttcgcctcccccgcccaccccagaagcaatggccaagtggagcgcgccaacacggaaatcctcaagggcctcaaaaccaagaccttcaacatcctcaagaagcacggcgactcgtggatcgaggagttgccagcggtgctctgggcgaaccgaaccacgccaagccgagcaaccagggaaacgcctttcttcctcgtctacggcgcggaggcggttctcccatccgagctcaccctgaggtcccctcgggccaccatgtactgcgaggctgatcaagatcagcttcgtagagatgacctcgactacttggaagagcgaaggcggcgcgcggccctccgagccgcgcgctaccagcagagcctgcggcgctaccatcagcgccacgtccgggcccgatcactctgcgtcgacgacctcgtcctacgccgcgtccaaacgcgtgctggactgagcaagctctcaccaatgtgggagggtccgtatcgagtgatcggcgtcccccggccgggctccgttcggctggccacgggcgacggcacagagctgcctaacccgtggaacatcaaacaccttcgtcgtttctacccctagtaggggtcgggtgtcaggtctcgggctcgggccaaccccgcaccccccctgggcgtgcagggttggccgggggctaccacatgcatatacttatcttttttctcttccgtatttcaataaaagcattttcgatttcctaaggactgtgtctgtgccattgtttcctttcaaagagtcttggcttgaattagcatgctcgtgctcgaccctgccctcggtggcccgggccggcggaaatcgccaaacggggcccagaaccgagccgtgccccggggcgtggtgaactccggaggggaatcggcaaaggcccacaatcgggtcatccataaccctcggtcaccacgttcccggcctggccagtctcgacacgtggatctccccaggcactagccccgacccgcgccatttgaggctaggacctgggcacgagccctcgttcaaaccaagacacagaaggaccacggcacaggccatcctcgtctcatacacacgacaaacagagctgacacaaaaatttcctctttatttgattgcagattaaattagtttgtacaagaagggggcccgaaggcctcagaagaagaaaggaaaaactatttaagattggcgggggcctgggggctcacttcgaggctcccgggtcgccggcctcgtcgtcgctgtcgtccacaccaccgtcgccgccctccacgtcggagtcgagggcgaacgcgagccgaggggccgtaccctcgaagctgtggacgatgtggtcggcggcgtcccggacctgcgcgcgcgcgtcgtcctcggttccaggagggaactcgtccagcgccgcccacggggagaagtccgggtccctggcctggtagcttgccagtacaagctctactgccccccgggcgaggtctctcgaggatgacttgatcgtctcctcgagctcctcggggagccgctggagagtcccggccatctctgagaggcgctgggcgaggcccccctggttggcggcatatttcgcgatccgcccgccccagaggcccgcctgccgcccgacgcggtctagacgggagacggcgtcccgaagcatgccgggccctacctcgcctgccaagcggagggcctcgacctccccggcggacgagtccagcgcgccctgcagctcggcgatagtgtgttcggcagctgcgaggcgggcggctagatcgccgtcgcccgtggccgccccgccgctacgcgccctcgcatccagctcccttgcccgtgcctcgagctcagcggcccgctgatccagtgcggccctctcggcgcgggcaccttccagattgcgacgcgtttgtttctcctgcgctgcctcacgaagggacaggctgtccgccagcctttgcgccgcggcctcggcctcctcgagagctcgctcccgctcggtgagcgcatcctcgcggaggcggagtgcggactcctcttcagcacaggcggcttcgtgcgccgccagtgtagcctcccggatggcaacggcggcctcgcggtctgccaggtccctctccttcacgcaggcgcgctcttccagcgccgtggcacgggcctcaagggcttcttcgcgacgtcgggacgccgcctcggtctccgccgcccgccgttcccgggcagcagcggcatcaaggaccccccgggcggcgtcgagcttttttcctagctccgccgcccagctcccgtattgaaggcggaggtcgtcctgcgcctcgttcatcactgcggtggcgatgagggcagcctcccgctcctcctccacctccctggcgatctccgccagctccttccgacggacctcgagctccgaggtgtgccggcggtgtgccttgcggcccgcctccaccatggcctccaccgagcgtcgcccctcttcgacacgcgcccatgcagcgtcgagctccgcccgctctgcctgcaggacctccatctgggcacttaacccgtccaacaccgtggtgttcgcggcggccaaggcctgcagaaggggctctacgctcagtggggcagcggaaggcatgggggagagccgcctcggtggggatgccgcacggctcggcccgccgatcgacgtaccggactcagggacgtcccccggacctggcttgtcctgagcgtcgcccgaggggtcgggcccgagcggtgcgcccgcggcctcgtcgtgggtggcctcggaagtcgtcgtcgcctcgggcggagtcgggtcgggggcttggcaggccgcctggcgtgcgtgcgccgcctccgcctcccgggcggactcctcggcccggcggagtctggcctcctcccgagcggcttcctcagcccggcgagcccggacggcctcctgggcagcctcctcggcttcccgaaggcgatccgcggcttctcgccggtcagtttcccgcctccgggcctccgcggtcgccgtatcctcggcctcagaccggccggacttggaatggcgggaggggcgcgacgggatctcgctgaagcagaagaaaaaccagaagacaaacaaaacgagtgagtgcggcgagggtagggcacaggaaacaaggagttagggcgcaagcggcgaaggcaaggggaataatgacgagaggaaggaagcgaatctcttcctcggcgtctttatacccttgccaacgctatgcccggctcctcgcttcccgcgcccactatctcgccccctcgttgctcgcgcccacgtctccactaattccgctcgcccgtttgcggcgcacgaggcggatgtgcggctgtggcagttgagatgggacatatcgtgcgcgcgttaactatgctcgccaacctaagcgccatcatcatatctccaggcaaaacgaaccggctcgtcccgattcgcgtgctactcgagtaatgtagcggtcttaaagagaccgctcattatagacagtcggttttccgttgccgatgtgcgcgatttgcgaccgctgggtttctgcccgcctgtagagaccggccccacctgtcaccaggcctaaggagtggcgtcacgcccgagcgcttccttcggggggggcgatcgccctggcataacgccgggggctactgtcggtgacatgggaccgggagtatcatgactagaggcttgggcagccgcgatcacccacgtggcccgaccccctcaggggggtcgggcccaagggtgatgtggccgcccctccctttgtctccccgaggggtcggactgctcccgtttcgaccccgagggccggggcgccccgaccccctgtgggtttggcgccacgtatatgggttaggtgagcatagcggggctcacctaaccgcatttattgcgggttgaacgagcgcgtcacgccgcatgtaatgcagcgcagcgcgctcgtttatccggtccgtgaccgggtgcagcgtgtgaccggtcacagaccggtcagatcgcgggttaggtggtggcaggtggcctgttacacgcctcgccccgtcccgtcggattgatgagagcctccaggcacttgtccctagccggagacggcgtgccagctcctgaagatggcacgtcggtcccggtcagatatatgccaggcttcatcccaaccattgcaaggaagtcattgtatgaagaagggcagacatgcagcttgctaaactgacgcgtggtggacgagagtgaccggtctgtgactggtctgacgcctgtcatgtcatcggcaaacaaccgtgcttccacgttgcacctgcttccgacggagtggaggttggtatgacccatcccatcggagggtcattcaaacagcagccattgcaaatctccgcccattaatgagggaggacagggctatcccagtgtcaggtaaaagtgcgagccaaatcttgctcaaagtaggatgggtccccacccaaaagaagggtaggtagaaatggtatatgtggtatccccttgagatataaaaggaggaccatgcctaccaagaaaagggaagaaaaaaaaaagaaggaagaaggagagaggggagctcatagaaaggacggggaaaaagagtagggagagggtctctagagttgaaaggctcttgctcttcagctctttgtaactccttcagagacagatccgccagaacacaggagtagggtattacgcttctcagcggcccgaacctgtctacatcgcctgtgtcttgcgcgtttgctctctcgcgaaccattccacagatcaagggcttagaacctcacttagcgcccccggctgaaccggcaaaggggagcccgcgcggtctcccggtgaggagccccacgctccgtcataagtcattctaccatttcctacatttatagtgatgttaatggatttagatatatataaatacgacaaatggtcatgttaaaaagggataaacagaagcgtacatttaaaatggatgtggtagtttcttagttggtagtgtttttataggaatgtatataatttcaaagttatacaaaacaaaaaaagatgaggaaaaaatatgtttcacaatgtgcatagcttcctcatctctctacttctataaagaggaagttgtcctcctccacctccgcgtaaaaacctttcttaaaagaaaaggtccatcctaaaaaatactttctaaaaaaacaaccattgaaaaaaaaaaggaacaacccactggactaatatcctcccactaaactgaataaaaaatcgttctgaagcacaagctaacatgcatgtgttcagatcacgtgagcacagctcgtgcgtagggagggatgcaagtgggtagtctcgttacccgcttgctagtttatttctggtatggtagtacaaaatttagaagaaaaaataagctagaagttggataagcggaataaaaaagcccgcttgtccgcccccgcttgcatccctactcgtgcgctgcatcaagccaagcccctacgagtagagatcactcaagaagaacggctgaacgaggccatcgccggagggctgtgagcatgtgaccggcatgctttgaatccgtgccttctttctctgcactgcttgatgccattgcaactttgcaaggcaaccaagtgctccagcccccctggtctcattcccagactttggtagctgaggctactggaactatgttcggtgctgcaaccgttgttggcattccgtgtgcctcccgttccagtgatatcggtcaccttgaaattcagtatatgtgtgtgttcccttctgcttcctatatattttttatcccaatccatggagttgaaagaaaatagtgtaaagaatagatcagtatgtatttaatacaaatgaaggtaaggcagatcgtgttaaggctaaatgtaaggttatatctatatgtgagcatccctacaaaaactaacccaatggaagagatgtcccaaaggcatttgcgctaaaggtcaagaaaaggcgccccaaggtcggctcttacctatatgaggacccgaagaccggttcttaactcgcgcttttggggaacacacagcaagggaccttttttttttttgtgagagccagggttgagccctggcctgtagcctcacaaatgaggacttcaccgccatgctatgagcacgttctcagcatatctgaaataagaaacaacataagatacaaatccagaacaatccttaaggatacatgtagggtgctatttatattctgcaaagaaacctagccagtaactttttatcttttgttgaacaatttacagagtcatcaaatagtaactgccatatatactgtcaagataatcagaaccatcctaaaaagataataaagcaaattatcccatattaaatcatatctcagtacctcacaaacaagtaccccatcacatgttaaatggaaaattagacacaactttgtattacaactcatgaataacaccttttttttattaaaaagaagtgcatagctaagaaaagcaccctgatggaaagataatgacaacgacagaattccaaaataatttgtcctgacagctaaaatggtgcttgcaataacatactaaaaactgatttggcatcagtatttggtaatttgggacaggattttctaaatatagcaggaaaatacaaaagtttattttctcagaataatgatcaacgaatctacatgtaatatgccagttgttgaaagagaagcaaaaaaaagagagagagagaaagaaatgcaatgtgcaaatagcaaagatgcatgtttggtgtttccgctacaaaagtcatggaccaagcgaaaacattgctctaaattcctataaagattaaagaagagggggagagagagaataagatggcaagacaaggtaatactaattgggctcaattatcttcccttaaagtaataatatagtactatgtttcattcagcaaaagtatcataaacactaaatatatatattccatatggtaattcaattggctaatggaacactattaggacaatttcaacaaacatgttatggatgaaaagatgacaccaacctgaggtggtcagtgaattatcaattatgcagtgtcatctttatatttgcctgcttgtctccccctcgtcctagggatccttcttaagcttcttgcttgggatcacacgagggatgctttttctcctccttatcaccaacttttagcaatcacacccagctagagagaagcatgctgtggaacggcagtagccagtaggcaagtgaccatgccagcttgaacaggttagtggatggaggagagtacaggaccataattccaactctgagtagattcagtggtgccatcttaaaatgttttctctcttttcgttccattgaagggttctatttattagatcaccagacacggaccattatgaaccttaagtacctgacgtgcttgaataccaataaaaagccactttcctgaatggtacccttctccattaaccagaggatggtcctcaccaaatcaatgtatctggaacggatgtcacattttattgtgccaaaccatatcctcaaaccatattggctgcaagtgtgtaattctagtaatgcacgttgaacttgagactgcaagatgaattaattcttcaaccttaaggcttcacttgagaatgatatctgttcaataaactcatgagacatgacccctcttttttcccccagagacgtgactactcttaggattggaaaattatgtgaatcaagtgctctaaacatcaagaataattagccactcagctcaatacaactccatccaggttccttcattaatccttgcttgcttagttgcctcctataacttgtggccttcttccatttccctaaacaactgagcatattagacatcagaacacagtgatcagaatcttgagtctccaaattcagaagttcctctggtatgaaatctatggatgaatcagcacaacgagcactgtatgaactaattataggagctaaaaccttattttgcacctcacttggcatctgcttgaagaactttagggcgctcccaaaatgaccagctttacaaagcaaatcaaccatgcacatatgatgttcaatagatggctcgataccatattccattgtcatgctgtgaaagcactcaagaccttcatctactaaaccagaatagttgcatgcggtaagaacatgagtaaacgcaatcccatctggttgaaaacctttgtttttcatctccttgaaaaggacaagagcctcacttccttctccattgcaagcatacccattaatcatggcactccaaacagctatatctctattggtaacaccctcaaatattttcctagccagattgatgctaccaaacttgctatacatgtcgattaatccagtagctactcgcggctctgaatgcagtccagtggcaattgcctgctcctcaacctttttccccagattagcagaccccaatttggcacaagctgaaagaactgatgacagagttgcttcattcggctcaatgtttgcgcacaccatgctatcgaacatcaccaacgcttcattcagatgaccaccttcaacatacccacttatcattgaagtccacacaaccacattcgccatgtgaactgcatcaaagacttctcgagcggattcaagatctccacactttgcatacaagtttatcaatgatgccgcaaggtcttcctcacattcaaagccaagcttaataatgagagcatgcacacccttggccaccgacaagttcccaaacagaacagcagctgatatgagattcacgagcactaccgagtcaacatttttcccaactccccgcatgcggttgaacagatcaaacacctccagataatcccctctaagtaaataaccagatgccaatgcagtccaagtaactacagacttgttgcatattccatcaaacaacaaccgcgcagcatccagatggctaccacggacaagcatggtgagaaccgagttcaacacaggcaaaccggcatcaagcccagatttcacgctaaacccgtagacgcacatgccaggattgcttgcggaaacggagtccacacacccggagagcacgccgacgagtgtgccctcgctgggtctgacccccgcacgccgcatcgcgttgaacaccgcaacagactcctccacctgggagctcctgccgtacgcagcgaccatgcagttccaggagaccagggtcgggcgcggcatttcgtcgaacaggcggcgcgcgtcggggaggcgcccgcacttggcgtacatgtcgagcagggaggtccggacgaacacggcggaggcggcgccggcgaggagggcgtgggcgtggacggcggcgccgaggcgggggaggcggagcgcggcgcatgacttggcgagggacgggaaggtggatgcgccgccgccgccgaggcccgcggcgaggagggaggcgtagtggcggaggcagcgggagtaggagcccgacgcggcggcgtgctggatcaggcggttccactcgcgcagggcggtggtggtggccgtcgtcgtcggcggcgtgggttggctcatgcgtttcgaggttttcgggggcctttcggttgttactatgtaaatttcgacaaaattgcatacctacgatcgcaaagtttggacacactagaatgccagcacttaaacgggcttcgctagaataccacgttgaaatgccattatgtaccaatctacccttgggcttcatcttcctcactccaactcctcatcttcctcgtcaccggtggctacggtggcagcaaggagagccggcggccagcggtggtcgtttgcatacggtcgatgggagtagtgggggcagaggcatccttggggcaaggaggtgcagctagcggtcgacggcagccgcgcggagggctaggggtagagtagggcggagcgcggtagggttggcgaggacagtggcggcagacgtgctctcgtcggccgcacacgatgaccaccgccgggagccgtcccggggcgacgacctccgcccacgcgctcccgccgccgcacctgcactcctgccaccgcccacatgttcccgccaccgcgtgcaacgaccgctgccgcccacacgctcccaccaccagtcaccgagctcgctccctcggttcccctcgccgtagccggccaccaaactcgctcccttggttctcctttggtgattaatatgcagattctatgtttttcgttaacatattttttaaactactatgcagcatagtagaaaaaatcagaccggacaccgaaccgcttgaactcatggtccacccgggtcatcgattggacccactgggtcgatcggtatttatacaaaccaagctatatgatgagtgaaagccatgacacctcagaccgcttggcactaagatgttatagctcagcgccatcaaagatgttatagctcagcgccatcaaggttggcgctgagaaaacgaccttttttaaaattagtttttggcacggttcaatctcagaataagttttttaaaagtgtcaagttgtcaaaaatatggctaatttattttagttccgtcactagttttcctgttgcaatgttcggcgtaggtcatctttttatactagatgatgccccgcattttgctgcagtatatatgttagataatagagaaatgataaaattatttggactgaaatattatgaaaattatttaagagtaataatttagcatgtgtatgtttagttttagaatgaaataaattgtagatattattactatatgcttgcataataagctttgtgtgctcaatgggttgatgtggcatacttgcatgtaggttttaaaagtgctaataaatattatgcttgcatgttgagctttattaggtgtttagttgacattatgtttatagaaaaaagagattaaaaaaataacaaaacaagcctcactaaacaatcaatctactccctcggtcccaaaatataagggattttggtggatgtgactcttactgagacaatgaatttggacagactaggaaatgtcacatccacggtgtgtttggttcacggtcatgcatggatgggatatggccatccatattttgttggatatggcgatccaatttcttgttttggttgaagggatatagcatggatgggaaatgccaaaagttagtgggacccatttgtcatatatatttttttatcaaaatataatcattcgagatcttgttttaaagattcaattgtaacaaatataatgtaatggtgtaatcaaattataaattagataaatggtttaggtgaaaaaaatcatttggagcttgcttaacataaaatcaaaccaatcgcagccaatcagaataggcaaaatttgctacaaaacactcaaagattgtggtctttgctgtgagacatccgaagattgtgtatttgctcgtggacactataaaaaaatggtaattagctgctggacactcctcctattattttattattagaaactttggttaaagacaagtttgcccatgggcctacttgtcaatctctctttctctgttcttcttcctctctttctctgttcttcttctttaatagcaacgcgacacttttcatcgccctcggtgcgcccaacagcagcaacacggcggccggcttctcgttcacaccgatgcgccgcatcccctcggtgccgacgttctacgtcgtgacgctcaccagcatcagctgctgcagcacgcatcgccggtctccgacacgtcgagttgtttcatggcgacggcgcgcccgccgctgaggtcggcacggtacacggtcccgaagctccccctgccgatgcagtacgcgtcgttaaagtgctccgtcgccgccaagatgtcgccgaaggagaacgtcgtgtccttgctccataacgaggcctgcaccgccgttgtcgtcgccgccgccgagctcccgccgctcgccgccgtctccgcgttctctatgacgacgtcggcggctcgcctcgccttgcgtgacaccgtgcaaaccaccacgaccatggacaccagcagcgcggtggcgagggagagcgtgacggcgagcaccagcctcgtcttaccggagtggccgtcgccggtggtggtgttcgagctgcaatgttgttgccgcacaggccagggttgccactaagatccagcgtcgtcagcgacctcatcttgccgagcaggggcgtcaccttgcgggagaggttgttgctgctcaggttgagataccacatctcggccagcttcgtcatcttcccgccgccgccccgccgtggccgagccgtctcgggttgggccagccgccgtcgcgcctctgctctgctgcaaggaagaagaaggggaaaaaaagatagagagaggaagaacagtgttaggggcattttggtacttacacaactctttctctccatctcgatcagaaataataaaataatgggaggagtgtccagcagctaattaccacttttttacagtattcacgaacaaatacacgatcttcgggtgtctcacagcaaagaccacaatctttgagtgtcctgtagcaaattttgccatcagaatatgacacatcaccgagactaaaactggatggctttatccagccaaatcagtcggatgcactcatctaacatattgagggaatattctctattatgggccgccccatccgccctgccctccaaccaaacaccacaaaaaatcgggcggccatctcccatctaggctccgagggagtactttttttttttttacctgcttcctcctctaacctctatgggcccattggcccaagggcccaattccccgctcccctcctcctttcctctctctctctcccagcccgcactccctttctctccccctcccctaacccctagctgagcggcggcggcggccggcggccggcgagcggtgagggcgcgaggcggcgcggcgtgcggcgcaggatcgagggagggctcggactgccggcggggggcaggcggacagcggcgcgacgtcgtcacggcgagtcggcgacggcgcggggcggggcagcggccagcggcggcgccggcacagggactctgggagggagccgggcaggcgggcagccggcagccgaccagccggggagaggagggattgaagattcgaatttcgaagtattgaaccattgactcattgaggttagggaactaaagttcactgatttcatgatttgttctacacttctacttaagtacttatctagtgaagtatctactagactactacttgcttagtttttacaactgtacttgtgagtagttcatacttgatacttcatagttcctactccctccgtttcacaatgtaagtcattttagcattttccacattcatattaatgctaatgaatttagatatatatatatatatatatatatatatatatatatatatatatgtctagattcattagcatcaatatgaatataggaaatgctagaatgacttacattgtgaaacggaggaagtagttactatcttgcaaacttgattagctagtaaggcagttagcgaggactaggagccttcaaccttggctactaggatttgttcataggaattcagagatcttagtaattagtatttctatcctttatgtatttcatatgctggcactttcatatgtttaccaattagtatttctgtatgttaaacaatttcaagtgattgtcaattctatcaatgtgtgaacttatgctcaattttatgttatacatgctatatattatataattattagtgtgtgatactatacaagctaatattaggcttttaggtgtatgaacaaaaaaaaaattaccccttcccatttcgaatacggtttgaaatcctgggcttgcccctggcttgttcgtagatttgcaatttgcaaaaaaatagagacgaaaacatcgcacgtggtatttcactgataacgctaatgctatcactctacagattggtatttgcatatttatagtcattttcactttccatcagtaaagtacaagtagtacagctattatatttcgtaatttttctcccttttttatgtttttatgtgtgaatttggacaccattataccgataaatgcattgtttgtataaactgatgagtactccctgtatttatctcttgtctttgccagtagcagctgcacagttaaaaggcttgtttctaggaatgtaccattgtttgcttctatagttttcagtatgacctgttgtggttgaagccgtagttgtctggtgtgctcattaacataaatattatgtgttatttgttgcattgaaggagcaccatggatggaactctttgaatgcttttcattcatttggaatatctagatatggttatggtgcatcaattaatttattcacataggtggtcaagggcatacttagagggtctcctctaagggttcatatgttaaatcaatgcctgtccaattcattggcctcccagtttagtttccatactccttggctgtattagtttcctgatctcgcacttcaccgtggtgcttactgaaaataagcaaactgtttgtcttgcagttgtctgttctgattgactgaaatttttcgtttttcagggctgaacctttttcttaagtaatagcaaactttatttgatctgaaatacatgtacatgctttttagccctagagatcctagaaaactttttattgttagcatggatccctgattttatttactgagagcattctaattactaaaacactgagaatcacctcactactctaaatactttatgcttagatgatatgttggtgttcttctcacacagccttgtagtgttacaatatacagtttctaaatcctggctccaccatttttttattattattaacttcgattgggaatgcttcactaaatgttgggctggaaacactgtttttgtgtgtgtgacatttgccagcaggattattccctctccctcatcctaattacatttgtgccgtccctgctgttgggttgttgggtcccccttggacctccaacagcagtatgaacacaggtacacaacatgtcaagcttaatttgcaggcaaagtggacatgagcgagggctttctgtcaatgtgttcacaaatgtgcctactccctccggttcccgtttagttgatgtttgaggcttggactattttggatggaaaatcttgacgttttagccatgtgatcaatttagactgatttgcccctgcttggctgcatgcatgcaaatcacatttaacttggtgcatctgagtccttcacagcaccataaaaatcatgaggataaaatcaatttgccgaatcatctcctacagcatagtaaaaatcgtgtggaaaagtagggtgccaagattcaaacttagcacatgaagctttgggactagcagtcataaccaccaggttaagaggatttgcttgttggatgtgctattctaatgtgaacttattaatcattccttggtatgtgagctcctgtccaaaacgtcaataactttgaaaccggagcgagtactgcctaggggcacaaagccaattattataaccacctccatcaattagggtttttatccagggcaagacttccatccctatgttggatgccctttgctgaaaagctatttgttgtattactacttagctcattactttcctcttttgtatctgtactagatagtaaatgtgatagcatctcttgttttctcttgagggaaaatgatagcatctcttgtagcttatagttcttaaagatagtctttatattcgtaactgattacctggatgttacctctatttgggtgatacagtttttcccatccattcatatctacaggtattaaaggcagcatctttaccaaggtgctaatcagtcacatgcataaccatgacttctgaagacggagacatttcagctctgctctctgaaccaagtattcctgaagagcagcctgaggcatctgaattcgatgacgtcgtccctgcaattttggaatcaattaaatcaagtgagaaggcattcaaaccttcaccggaggaggctgcttgggctgattcttgttttgtgcagacatctgagctttcggatagtgactggggagcaatgaagcatgccctgcttaatgctcttgaaaagccaacagaaatacccaacaatacttctgaaattgtgcacgaagaaggttcccatgcaattttagaggtcaaacctcactctctccctgctgaaattgtttctcagcatgatgacatgcaaatggagcaaaaagaaaataatgattatgacactggtactactgaagcttcggaagttgctaatgtaattaggggcacaaatgaacatggtaagcaaatggatggatacacagccagacctgaagatggcgatgagttgtcttcgtctgaagttcttgagcagacagagtcaagagagactatctttaaggtgtgggatctggacgttccgttttctgatgaggatgagcttgaactcatcaaggatctgaagaaactcctcaaggacaatcctcaggagtctgaatttcgacctcccagtggaacagccaagacattgagccagatagccgtcgatgatctagtggcagacttgagcgacttgtcattgcagcaaacagacgagtagcaacattcccccaagatatttctgtggcaaaattttttaccatccccgatgaactattcttcgttctctagctaacagtgcagatggcttaagtggaggctgtgcgtttgtaagaattagattgactgtttcgctgttcttttgaatctctacctttcttaataggtagttgtagtaaaaaagttgttcttttttatctgcgtgtattaaactataggtcctcaaacttgcacgcttggtttgtgcacgtccctgtactgattacgcatccacataatttgggtccttctggctatagacatgccacttgtaagttgacttgtgctgcgaacggcgtttaatcgtcctccgtgttttgcgctctcgtcctcaatctgccgctcccgggcgggctgtcagtttagaggagcttatggcagttgccaaaacatcttcaaacagtctacatttctacttaaatattaaaaagatgtagttgtataatccaaaaaaataaactagaagccagaagttgtatttccctgcttctctatattcttaccaactaggttctcagaattaaacttctcaaatagggcctaagattctaaagcagatggtagcttttgagaatatgaaaaagttaggtttttcaacttctaaattttagtttattttctgaattttacaactacaacttctcataatctaaacgaaaaactgagttgtttaggtgagattctaattctggaagaagttatagcggccagaaacttccctaaataggtcctaggtgagtttctcttagacaagttttggcactgtcagagactatattgattttggtaaaaattggctatcatttgtactaagatttggcattaaaccaaatcagcctatcaattctatatttaggtcttacctacaagatcacatatttagacataatcaagatcttcgataagaatcctataaggccgactctctcacacattgagatgcttgatatgatcattgagttgaattataccgggcaactctcgcatatattaagacaccatctctaaataaaatcttacaagaccaactatctcacacattaaggtatgatcttacaattctacaaaactgactccatgcaaagctagctagacacatcgacagctgtcgactaaaggttttagtgacgcaagaaaagaacgacaaatgcacttgcgtgctattgatgacatgtcaccaatgttttaaatagctgactaaggcatttagcggttagcttctcaaacagctatagcgggctaaatggagctatagcggctaaattgtacatgaaagcaaatagctagaacccttctcaaacagctatagcgggagatagcggcagctatagcgggagatttaaaaccctgcatgtcactccccatgggtatgtaaattatcatttatttatatactaagctaaactttgatcatgcttgaaaatatctaatgatcatatagtttgaacctaaatttgatataacataagtaaatatcataaaaccccatgtattatggtccaacttcataaactacgtggcttttggcacgtgatacattacccccaagtattatggtccaaaaattttacaaaatcatatggttaataatttgggttaattggatcatgccattataaaattgctagttttgataaatactattactatttatcttttttaagcataccactacatctgtctcaaaattggatacatgccatcatctacacttaatatacgttttgaatcattttacatgtgttgtattttagtatggaccaaaatacctccgcttactacatcgcaagcattgtggttccccatcctggatcagctcacgctagacctgctagcacaactccggtctgacttaacttcggctacacaagcacatgcccttgctttcaaaggcgagctaggacggggtcttgctatcaagccgattgccagagaggtggagcgactggagatggcccagccggccgaggaactccaagttctagtcgaagcaggagttgccagagagcttgagctagttgaggaattagcagttggctaatagcacagcgtggcgggattgggtccttgagcgcgttgccatcacctcacttgatgccactgacacctgcctgtttcaccgtcgctcatcatttccgtcagcttgccgttgagcttgtcatcgccgctggggccacgtgtggacccgccgtagaccaccgcgacacaaccctgccaccgtcgccgctttctttgccgttagcgccgccgctggaccatgtgtcaccgtcagacccgccgtccctgacgttgcaccttgtcatcggcgctctgccatactcgtcgtggggtagctgtgattgggggattgtgggtttttgaagctaggttgccggaattcggggttaaggttgaaagatgattggcatgtgtatttttgtccatacataaatacagagcacaaaatatgattcaaaaacacgtgttaagtgtaaaggatggtatgtatccaattttgaaagaattatagtggcatacttataaatagatgaatattaatggtatttttcaaatctagcaaattggagttgcattctagctaaaataaaaaatgcttaagttaaatggcgaaagctttttatacaatggatcaaacaatatgaaatttcacttttaattagagggagctcatagagaaagtatcgtcgtaaacaagcgtcttggtctatacgaagtttttttcgtgctctaaattgggatagaccgagtaataataagaaatttgggccaacaaaatagcaagttggcaactcgaaaagaataaacaccattgtttctgattttgccgtagccaaaaattgctggtatgatcgccaccacacatatcggaccgtccactttccatcggaaggcccagacttgcccacgcatgatcccaaggaacctaccctagtccaagcggcgacgatgaacttcaccacgggacaatcagtcgctactcgctggagcgaaccaagagcgccgacctgcaaatctccaaaaccccggtgtacggtcgcctcaaaccccgatctccccctccggccgccgtccgccgccgcggcactccggccggcgggatgagcccctccgggcggctccccgcccccttcgtcttccccctcgtcctgctgctgctcgctctggtaagctgatccccctccgaacctcgatctccggttagatctggtcatttcggcttctcgacggttttcgcccttcgattgactcccccttcgctgcaggtgccgtcaccggaggcggccgagtccacgccggggacgcggacgcgcaagatcggcggcgccgcctcggtgttctcgctcttcaacctcaagccccagaacaagttctggtcggagtccgtcatccgcacgggttcggttccgcgcttcgcagtggtttcgttgtttgcatgttgcatccctttttttggttggtggtatgctgacgggttatgtaatttttggtagaattcgatgacttggagggctcaacatcgcgggactccagcaagaaggcgctgctcaacttcactagagctggtagatttttgcgttgctcgtaaatttattgggcttttgaccatattgcaaacaaaccagattagcttacaattctcccctaaagttgtggtgttgcgtggccctttactagctgctgcagtgataaattttcttttggacgtgttcaagttgcaggacaatgtaaaactgctgattgaggctgatatgattttgtttataggcttctcattattgattcctgaagagtctggcataattaaattatgttagactactatatcattgctttgttgtactttctgacctgaccttgtatgtcatataatacttgagattactgtaactcttttgttttagccatgagggtgctgatgctatatttcaagaacctcgagttctttagtaagtataaatggaattattgatggaaggttaagagtggagagagaagtggttgttcctaaatagtcataatgcaacagaactaagaactaccttagaaaatgattttttttattgtgatatatccgataatcattgagcaggaatgtataaccaatgcaacttcaatatctgcaaacaaatcataccgatatcgttcagaaatggctatgttagagaggcaatatgcccgttattgaagcattactttgtggtaaggactgtatttttgcatgattagtttagtcaagaaacgactacttatttatgtactccctccgtcccaaaataactgaacctaggagtacatttgagacaattagttgcatgcgaaatgtgcatagtgttgaaaattttatggtgtactcatgaattacataagacgactgttcactactaaatctgtcatttttttttgccatctgttgttcttaggtaatattgccaactatatgagccttgcagaggttgattctatatatctttcagtacctgtaaacttcatctttataggatttgatggaaaaggaggtcacggtaagccgacaaactatccttatgcaatacttatgtcattctctatttcttatttgttcatacgaagtactaacaatatctttactttatttagagtttaaactgggacctgaagaactggaacgctggtttacaaaaatagatcacatatttgagcaaacaagaatacccccagttggcgaagttcttactccgttctacaagaccagtgttaagaaactaaagcaatatgaccttcctttaatcagccacataaatcacaagtacgttcctttacttctctgacaattgttcttacttggcccaatgttttcatctattttgtataaatatgccacacataattaaattttgcctttaatttacctcactttctgtgtggtgcagtttttccgtacatgcagtacacatgggtgaagatgtcatgtctgtttttcaacatgctataaaagttctatcccgtagagaagatatcacagattcaaggtcagatgctcttgagacacacatattgcttcaaacttaacaattattctcatccagcagtttgataaaatttggcaagtgcttcatcacataaaaaaactaagtgcaagtgtagcacaaaacagatatggtctttgcattcttttcctattacttggcaatgatgtttacaaaaaaatagatggttctgtttttagttttcacagatttctgcttgtttattactatctgttggaatccatacaagaggaacttgttaccatgcttgtaattgtttgtaaatttgtttgctttattgtaaaccagctaattaactatgaacagctactaggaggaccctttgtggtggcacttgttacttctataatgttaacttatgtttctcatcaatgtctgctgttggtaacagattcattttttgattatgttgtacagagaaggggcagaagcactttggcaggtggacagtgaccaaatggaacatttattttcaacacttgttgatcaccttcaaatacaagaggcatacaacatcttcatacttaatcccaaaaccattggcaagagtacccagtatggttatcggtgagtttgtcggcactgttaatacaatgcatataattaatgcaacaggagttagaaaaatgcacatttattatatttagcatggcaggatcatggactcgtaatataacaaaaacactacaggtcatttatggtagcttttgatagtaccaacatggctatgtttcattgcagtgctaccctgcatctgaatttcttcaagatattaatctagaacctattttgcactgctttttctaaaaaaagcccatctcattttgaatttagaatttgattttagaacaatttatgtgttttttttttttgcttttaaaaaaagcagtgccaagcggggcaataaattgaatggcaccaatgtagctagtcttaaatttatccattatcaatgttaaatcctttgctcaatataaatattgactaaggctccactaggtgctgaggtggattatgataatcctataacccaaatgaagatactgttgcattccacagaaatattgtgagaaacaacagctaaataacatattttgtctaatctaatctgatttctcaaaaataccacaacgattttctgatcagctcaagaaacaaacacatcatagtgcagtgcaccaattccaaacggtgtcatttacattcatggtctgttctctgttgattgttttatcacatggagatataatatgttctcaaattagacatgcgttttgatgggaacacctctgaggcacgtcacacaaacaaataaaaggagactcgtttttcttggctgaactgcctagaaatttagtttaatattagaacaaaaatggtgtcagttcttataaatatattttgtcgtgttgttgtatcatgcaaacgttacctctttctattcgatcctattttctgagtgtgagcttggagcaatttccataagtttaaatagcccgcaaatggagttctacaactagtcttatgaataattgtacagttttatttcttctgagaggaaataattcaaataattgtactgtaacactgttacttgataagtgatgttatggaattcatcaggtcaaatatccttggcctctattacatgtgaaattgtcaacaatggctgcatgaatatcagaaggacctctgtggtgttatatttgtatattccatatatattttacaatgtctacattactataaaacgagaacagtcaaatttgacctttgatattgttaaaattaccgaacattgcttattggaggatgaagttcctaagcacctatggtagctttcagctgaaaatgggtacatgtgcatcaaaataaagttatgtggtaacatgctaggcacatgcagaattatcctgtatacatagtaactcaaacattgcttaaaatggtggcatattgttactcttaggtgattttaataaccatctgtgtttacgtagtaagcaatcactttgttgttcatcagctaactgaattaattatttttcttccattttttttgatttgttcaatacagagtctgttggtaagatgagaaaaatctttgctgtagaaataaccactagtttgtacactgggttctggattgtttcatgcattttctcctgtgatgtttgattatttaagtgtaatttcaaagaaatcacctaactgtttttgtgttaattttttcatcttattttgtctatgttttcataggaaaggcttctctgagtctgagatcaacttactcagggaggtaagatgtggcatgctttatccattctgctatatatttaagaataccactgcttatatcttcttggtagcatagatgatagatctatttattgttgttgcaatttctggtaatatatctttggttggaagctggtggacctgctgataacaagagggcgccctcatatttttctttatacttatgcattttaaggagttattttcagttataactgtaattcactttatatttactgtcttcctttctgctctttccatttcgaagttgacatgaatacatgatgcttgactccagtttatcaggccttaaatatatgctgtgcagattatgttcttctgaatggatatgctgtgcagatttatgtttacctttctgtatatttccttagtaacattggatttgtttgttgagaaacactgtacttttgtggacaatgacatgttagtttttttttttcagaataagaccctgcaagctcggattcttcaatctaaaagtgacaagagactctatctgggtaattataatctttcctatgtatattattttgttttctaatttctattgcagtgaagatgaaaatacacatggagatagtctacttagttcatccagatattgccgtctgaagtttgtttatgtgtttgttaaaatgaaaagttattacttaagaatcaagaggtgcccctccataatattgtatacattatgaatattttggaaattttgacactgggtaaagtaggcccacataattaacagaactaatgatgtttacttaaaggttgttatggtattggttaagacgttcctttgcaatttccctagtttattgcttatttcggaaagtttaaactcgttactaatatatgtcactactatatttatctcccgcttagttccaggacttggcctaaatttccagaattgcaattagaagtgagcaattcacctgtttggatgtaataccagggactgcatgatgaagataaattttctgttgaaataaaataaccatgtgatataactatggtgatatttacaagaggaatttttagatttacatagtttaatattatggcaattggctgcagtttcaatagcagggggcagcggatgatgtatttttgtgggtgtatgccagagccgctaaagcaattagatcaaccgagtaactgacattggttattagtgatacattcctgccccctttaattattatatgctttatgcaaaggaagtgagagcacccatgggagcggataggttttggtgaaacatgggatctcttgaagctttctaagtttccattatcaattctcagtgaagcacacctgaacagccactgggattggcatagagttggatacgggaagaggtgttgcttgtgatccaaacatctgaattgtgttagatctatatgttgccgtatgtgtccacttcgagtagggtgttttctgcatattttcatgtagtgtgtgcagtgtgtgtatgctttgtgtattcacccattaggattcaagatctaattcctcaacgtgttgtcatgagcacatggtgggggttagtgtttccatcactttctccagccatcagtggcctctaccattggaaacctcaccgactggccagtctctgcaccttacatcagattgtagcgaggcgcagagccgtggcctggataacaaccggaattggtgaagaggtggcagctgatgaggggaaacactaaccccaatccatggctcatgatattgtgttgatgaattgaaccttgtattccaacgggtcatgggccaaagtataatacaacagggttgcaagcacatatgcacaaaacatgctgtactagaatataaatgcacagctatagatatagatatagatatagatatagcaaaaggggaaaaagattgcagccatctgtcatttgtccaatcatttacagtgcgcattagtgcatgtttagtgaatatatgtcgttattccacattacaaaacattctttggaagccctaggatgaactatttagggggcttaatcgatgtgcagtctgatttttgtgaactgtgcttccagttgagaaataatatgctgttattgaaatgtgtgtcgcgtgaacacaaggtagatccttttgcagtcacaacctccaacaaggacactgtttcaattcagttttttctctcactgtagctgtatgcacagttttgatatatttaactgcaagctcctttagttattttcctttcggtacttatctccatctctatgaatcagatattgaaaagggagtcaacagaagacccttgtatgagagtcatcctttatcatcattttcgtggacaacatctgacaatatggatatggtatttttaatgttacatttctgtattctttacaaaatcatttgggcctgcatcaacgtgttagtttttggtcattgtgttggccaatccaaacatttcatctgtgttcaaccttggccataactgacttagtggatgaagcttgaggctgcataacagtcaaccacaaagctaatcaaatattgacttgcttgctacttactccctccgtcccaaaataaatcaacttctagctacgaacctggatataggttatgtccagatttgtagccagaagttgatttattgtgaggcggagggagtagctaattagttcattagacggttacattgtttttccgtacatgcatgtattcagagttcttagacttttgatctagtgaattcaagaaagtgatatatactgcaactggtttatacaacttgccatgtattataaattgcacttgaattttagagttcaattttttggtttgaaggtctaaaaacaaatactttgttgccagtatagtatggaatagcaccaattttgacattgaactgcttggaattaggaactgcagtactgcacacatctttcttgacttcaaatactgacttttgttgacacttggaattaatgaatcaaaaaggatactgtattcccattggaattggttagaatgcatgatacgaagttatgaaggcaaacattcgtaaaaaaaattctaatgtataaaccaaacagaatgcatatattcaaattctttaacagggggattggtcaaagaagtgcaaggaagccttaagcaattttgagctgttgaaggaaggaaagagcaaagatgatattatttatgacaaagctgtccaggtgtcacattttccttggtacactaaatacactaaatgaaatatctctatatttgcatgtctaacatcatagtatcacacgctcttgtaggtattacatggcaaaaaggatgagttgcatgatatatttgagagtgcactcaagtccagtgatttgaagggtctgcatgctgaatgccttacagatatgtggattggcagagacaggtttgctgttgtttcatttcattaatagttaaaatcttagagttaggctagttcctgttcttctaaccaaactttattttcaggtttgctttcattgatctgagtgcagggccatttgcctggggccctgctgttggtggggacggtgttcgtactgaacttagtctacccaatgttgcaaagactgttggggctgttgcaggtcacttcatttttcttatcaggccttctctacctattcaaattcagttactgcctaatgttatacaatttggatggtgatgaactagggtgtatagtttgctgtgtcagtatatcttttgtttaaaaagtctcattagttttccttagtggcttgaacgaaactaattcatctctagaatcataagaagttttttagtagcccaggtcaaaagtgaagtttttgtaaatccttttttgactaaaatggttgtttcttgtgatggtttatgtcttctccctcattattcatgatgggacgctaccttagacaactcagtgtatgcatattggttttggaattagttttttgtagtagcaccaggcacttcaatctttcacctgtataattttatttattggcctaatttgcattttttttacttcttcaaatttaatactcattccatatgcacttggaatgcaaattcctagaacaaaaaagagaggacaatttagcattgatacaaagctagcatttttaatgggtcctgtgttgtgtcaatagattattcatggtaaccaaacatgggtagtcatgttattatattgactcattatactcaagcccgtttacattaatctaaattctatgctgatcgcacacaaaaagaaattgtatactcattatgtcattcaattatattatattaaggcattcttgctctacttgtttcaaacgtcataatttgttgattcaacaaacttgcagttatttttcttaaaatgttatgctcagttgcttcatagttcttaattgttaacgttgccatgaattaatgggatatggcaatcacattaaatgagcccatgccaatcttcttatgtttattgtaaacgaaaacctcataagttgtattcattacatcatgtttcaaattctgatagtcttatagaagtattgtcatcctgattattaatataagtgaaggacaatacctcaagaagacaacctatcaattgtgtggcagaatcatagttgttaaacctggactggtgatctaactgttgagtccatcagttcacctggtcagaccactggttcaccggttcggccactggttcaaaaggagataataaatatattttccttagagatttgctcaaaagggttaagtttaatctattttaccttccataccaaccaactgccttgcctggctgttttggtcctcgtgtatgcaacgagaggtccctagtttgatcccctccgcgcacctgtgggcaaattgtttagaaaatttgttctacccggtccaaagggcaaaaccgcctggtttaacccctttttccaggtcacatgctggtctttcaatcagaccagactggactaggctctggttccccttttttactgtcgaaccccggtccagtctggtttaataactaggggaagaatacatattcagactctgtaattattcagctaggaccaggccatctggtcatgttgtttgccctgttgttgctctgattataatcacaaggatccggtccttaattgaccggaacaagtcttgtatctttatcattacaaagcttttttattacaatttgaaatacttatacaaagatggtagtaaatgataaaaatcactgtaacttatccatcgcagatcttgttttattcataaaaacatcagtaacctacagatggattccactcacaaattggatttgtataagtcaaaagttacaggatcaaaaaagaaaagaaatattgaatacaccctgttaggttcctcagccatggctgtaaatacgactgttgatttatggtttgaacaatgcacatttacagcatgggatggtgggagggcagagggtttctcgagcatcggtaatgaggccaaattgctgtttaagctaaacaatgccctggactggttataggctcagtttggcattcagtgaattatcatattcttgtttggtgcaactactttagaagttttgttgtttggcaagcttgcttttcttttgatttaagttgcaaaagataatagtagtattactttccgaaaatgtggaacaaatgaagtgaacatgattgttgaataacatatgttctagccttatctagatcgccagaacaaactataatgattctaattttttattttccattgtatctggaggaataatcgcaacggagcacagcacaacaaccacaaactgggccttctgtatttctatgtgtactaacatatcaacgaatacttgattcatgtttttactacaatattttgggacttgctattttccttactgattcccaggcttccagcaaaccagtagggctagaaaccaaatgacctaattatctggaccagtatctggatgctgggctggcaaatcattgttttttcctttcaataattttctacatgcatacctgatacatatataacaccgaaacagtgctggttaaatgttaatatgtcaaagtaaacggtgacaagtagtattcatgaatgtatagagtagcatctgatactttagggtccaaacataacgttgtgtgggctgtgttgaccccttttggagaagcatggacaaaagctctggggatgcttcatgtgcatgagcatatcctacatgaggattagacacaagtgaatttgggtggtactagactgtctgtgtggggacatgtggatgtgggcctatgtggagcatgtagtgtggatttttgccatcacttatcttggtatgcagctttgacttttggggtggaacagggtgagtgtgactccatagtcaaattgctgggcggccagtggtggcttatatgacaccaagttagttccataatccatttatagtctggaatatggaacagttcataatgctggacagtccaaatgttgcaactgcatgttagcccttttggcagaggtggctgtccaagcatgttgctagctttttatgggctatgtgtgtaggctcatttctggaatatggaataattcataatggttgacagtccaaatattgcaactgcacgttagcccttttggcgaaagtggttgtccaagcatgttgctagtagctttttatgggatatgtgtgtaggctcattgctggtggggctaggctatatcagggctggcaagtgttgcaatttgacaatttatttctgtaacacttaacatgtatacaatgtgtttgctctgtactgagattctctttgcggcactaatttatgatagtcattcttatgcagaagttatagaagaagaggctgaagctaaattacaagatacaatcagagagagattctcatcttttggcgaggtatgctggatttctcttagaatgcactggatattattattttattcatttataaattattttttactactcaatctcataggctaaatgatggtacttattcttgtaatctccatgttaggcaccatagattttcaaggtgcacatgttgcttatgcaaattccttttctttctcttgcccctagctcttatttttgagggttgttgtaaagttcaattgagatcagtagagtgagagctttgagatcagaactgtagagaagagagggtgtagaaatattttggcagcttggaaatattttgctctgcattgtactcaatacatttttttgctagacctgttgacgattcaatatacaagtggtccataagtcattataactagcacgtcactggcaacgatattccacaacatagtggcatcccaagaccccactgatgttaatcactatagacaacaagtttcctcttgcaatcttgtttgctgtgtaactttcccttttgtttctgtatattgttatgacatcttgaactagctcttgacttgtttatctgatgccatttttggggttcagaattaccatgcagtagatatcctattggcagagattgatgtatacgaactttttgccttcaagcattgtgttggaagaagggtacagcttgccctttgcaaaggtacttttgatggccataaatttgggtgttccttttaattattcacattactacatagtggtagactttacttgtagttgatatttctaagttatatgcacttgagctactgtttgtaccatacatgaaagacattccttatgtttctctccaatcattacagcattcttcgctctttttttattgttttgtcctttgcccatgttttctcacaagttgtggatgccaataagctaataagtgttcttttctttgctgagatcttcagtttatggtagctgctggacagccttgtactgttcacgaatttgctttgctttatcagaaagaccttccctttaactagaaccttattttttcttcaaatgtagaacttgatgagagaatgcatgatctgaaaagtgaactggagggttacaatactggagattcggatgatattaataagaagaaagctcttgatgcattgaataggatggaaaagtggaacttatttaaagatgttccagaggttagctttgtccagcagcttctactacacaacataaaaggaacattgtaaaatcagtttctatagcaaaacattttccctaataagcaggataactaaaaacacatattcactgcgcatgcaattgctgaagtctaatatttatttgttaagttaacagaattttaatcatacttctaatgacgaagtccaatcacttgtgccaggaacatcatagttacactgtggctcgcgattcattcctcgcacaccttggttccgtgttatggggttctatgagtcatgtaattgctccttctgtttctcatagggctcaccattactatgataagttgtcgtttcaactgtactttgtgacacaagaggtaagttcaaggggcaacttttctgttgcttatattcgaatgcaatacagttatctcaacatgttttttaacgtaatgcagaaagtcaggaacatgaagcagtttcctgttaatgtaaaatcagtaacagagggccttagttctgtgttactacaattccagaagccaatgttcagtcaacgcatgtatgtaaccttcatcctgtaaattttggtttgtagtcctgcttaacttaccaggggtttaatattcatattggaagttatatgtgaaagtcatctgcacctggctagttttttattgtagcagtctgacttcctaattcctatcgtatgtctgcatgtccaatataatactggatcaaacttgtttagagcacaatattgatcataaaagtattagaaagattggaccacgccaatgatttgtatccatttagtgtttgattttttgatacttatgctgtgcactgagccactgaccctgtgggtaaatgacctaaagtctgtatggtggtggtcaatatggctatgattcacgaaggcagaaggaacagataatcacagtgcaggggatgggtgcatctgaaatcaggagagattagaactgagggagttcagatatcacttgaaagctgtaccctttataggccctaataaacaatatctaatacatggaaatcaactggcaagtcttatgtctaagtggctcaagtccaaagcaaggagctaacacgaaactcgaaactcactgttgctgagctgttgccttcgacaccctggccacatgagcgaccgcagacaactcagttctctacccaaacaagccaatgggcggtggattgggattgtaattctttggtttcgtttggaagatgaaaacagttacttagtatgctttctattagtgactggtctaatcatgtaaagtgctctatcttccatgattataattcttgtagaattttaggagtgacctaagcaaaattacttgcatattcaataaacatgtgtgcgtgagtagtttgtattcaataagccctagtctatcttgaataatttcataaaggcttatagatgtaagctaaggacaattctatctattggatgaatgatactttatttctgttcgacatatacaagttactcatatacacactacaagttattttgtataagttgtctgatggatttgttctatcagtcttttaccaacattactagtaattcttacattgcaaagttgcaagttgttatggatacccttacaggttgctaactaatttattaatcatatgtacttagttcagttagttacaaatcaatcatctgcagtggcggagccaggatttagacttgggattgggatgggcctatgagtcttggacggggcctaatacactattacttaagttaattacctaattagttaggtgattatgtgtgaaaagaaatcgttgtagggggccaggccactggccgtcccccctgtctctgacatggatcttctgtgcatagaatttagttgcgtcatttaatttagtagaaccttgtaagcttattatagagtgcaatacctagaagggagttaaatgtacttacaagatatattatatcctctataaactaaatatgtaattattttttccagtctaatttgttatggttgttgatatataggttgtcattatcagaggatcctgccttgatgatggcattttcaatggcacgtcgtgcagctgcagtcccacttctgttggttaatggtacctataagtcaactgtccatacatatcttgattctgccattctccaacatcagctacagaggttaagcgagcacaactcgctcaaaggtatgcacattttagtcgcctgggagaggctcaattagcgagtcatcttagttgcctgggagatttggaaacatagaaatgattgtgttttccatggagctacccctagtgtgtctgtggtaaatccaagctgtagttaacgagggtgcactttggtgctgggcaggagattcaaagctccaagagctgtttgctaaagcaatagctcctgtaccttaagcatgtgtttggtttggggaccaagtgggatgggttagacctatcctagtttttttgggatgggatggttccagttgtttgttttgtttatggtatgggatggttctagtattttgtttggtagaagggattgaggtgggatgggatggacaactttgcattgaccgttagtgccgtctggctcccagcggctggggtgcagtgagcggcgagcgtgggggcggaggagctcatcgccgcgagtggcacacaggcaaaagagtggtggctagaggcaagggagtcgacggcgttcgtggaggtggcggcctgtcacagcggaggagaggccgcggtgtcttggagaagcgctggcgctcacggagttggcgactggcgcagacgagcgccagcggatgaagaggcgagctgatgtcgtgtgcttcgtccaggttggacgagctcgtccggccgattttgcttgatggcttggtcccggatctgagaggaatattcctctccagggagtccctaaaccaacccaactcactcatccctaaaccaaacactcctaaaaatggcaccatcccatcccatccttgcaaccaaacacatcctaggaagtcgaagttcgtgtttggtgttgtgtgtgcgtgcgtacatgtgtgtgtgtgtgtgtgtgtgtgttttttgtgttttgtaagaccttggtgggtgggtgctggggttggctaattccttcacctctcgcctcttttttttcctgcttaattaaacgatacgcaaatctcattcgtattcgtaaaaaaaggtgtacacattttctttgcttttcatgatataggaacagaagacatcaagttctgcatagtagaagatgctaaatcatatgacattacaatttatggaccaatgaacataaaatgctaaatattttgtattgaacataattttaatgctataaaaattccaataagaatcatgatttttgtacactcaacattatacagactggcaaaaatctgatatcagatttatcctatttgtcaggatctatacaacacaaattgtgcatctattccatgatgaatagttttgattgtttttttttattgagaatggaaatttgatggtttgtacctttatatgtactatgatcatgatttgtttttgaacgttcgaatcacttaaaacgtggtgaatttgactgaagacacaggtaccctaggacagaaaaactgcattctttatgagcaactagtgacatgcccgtgccttcaacgggatgttaaggaacaaggacgaatgcctgtgcttagcaacgggatgatggttttacggggttaagtttttcctatccagttcttttagttggtcgtaaaaacacaggattttggtggggtggttttttgaggtagggtggttttcttacgtggaggaagaggtggtttttgggtggagtgtttttttgaggcagggtggtctttttacatggggggagccagagaggacaactctttttttacagtagagagattatgaacaaaaaatatgtgcaaggaggccaagattttacagtagagggttgaatgatattgatcgaggctaaaatggcagtggggaagttcatgggtcatggctgagctgtttaatctattattgctaaatattacctatattgtgtatttgttatttgttgatatcagtaggcctgcaaacacaaacctttgacagctactttctagtgcaaaagtgttaacaatataatcagttgaaatttgatggcatgttactaatgccatttctgtgtgacagtataacattacatttacttaggtacgttagtggttaatatcgtgagcaagtttgtaagctagatttctcttctatatgcaggaggacactcaaatcacaggtcaacattggagattccaatattctggttcatacatagtgaacccctattattggataaacattatcaagccaaatctctttcaaacatggttgtagtagttcaatcagaagttgattcttgggaaagccacttgcagtgcaatgggaggtcaatcttatgggatttgaggtaggattgccatatcatacacatgatttatttggtttccagttggttaccttcgcaatctattatacagtcttgtctttcatgtaccaaattgtaaccattcttgattttagaaaaaaagaaacactgggctcgatcacaggccaactttaaattgaaatttaatgttttgaaaatttatgttcatccgtttgaaaatggaccagaatctgacatgttcaactgaagcggtgaccatatttagggttcattcagtttatgcacacatgtggacccctcatagttagttgcgataacctgactttggcccagtccttttcaaatttactggattgttgaaacagattattggctctactcttcgaaaaatacattttctcagaaaacttttttctactatattgcttagaccacttattttaagttcctttttaagtttatttatcaaaatattttatttatctctataatcaagtagataatctgcagcaacaatctgctcaataatctgattcaaactgagccttgagcattgtcgagcagtgagaataaggctacataatttaatgaacacaagttaagaaaaaaatggtggctagaccagtttaacttgggcattccaaacctgaagaagagaacgcttagaccacttgtttggtactttgtttcattagcatcggtcaaccttttgacatcaacaccacaccagtttaatcacaagattgtacagagccaacttgctgcagaatgtggccatgccaatatttgggctttggcaggtcttaatatccatcctcaaaaactaccttttttcctcctgattttgagtttgattgaactgcattaatgctattaataaactgacttgcaggagaccagtaaaagctgccattgctgcaactgccgagtatgtatctggtttacttccttcacatctggcttatagcccagctcatgaaactgcaacagaggtttgtcatacgactatacctattagtcttcctatttgttaactgatgggcaggatatgtttcttttctggaaccagataaaattatcaatatttttacattttttcatttgcccttcgcaaaagaaagcatgcagtcaaatttctatattttttttaccagtatatatgaaagactttaacacttatcatgtggtatacttagatatgctgtactgtagattttcttcaacatgttcatataaaacttagtgatcaaagttatattttggagattctgccgatgtacagaaaactgcagtcttaaacagattgagtgatagtttagtctgctactcattacattttctgttttctaataattctaggactggacttggtctgtgggctgtaatcccttatctattacttcaaaaggctggcaactttcggagtttcaacgtgatgttattgctcgtaactacatcattactgcagtggaggaatctatacaaatcatcaattcagcaattcaacaattgattacagaaaggacaagtatcctaataattttgctttttttaatctaatacgctcgagagctgcatatcatttcattaaagaagagaaccgtatgagtctggaaaccttacaaaaaaatagcaacaaacaattgcgccacggactattttgctggacaaaactaagaacaaaattttgctgtttcattattcaaattccggacaatttaatgtttgttgggaatcatgttgttttttttgaaaaagataacagagatggatcaactttatgtatgtgtcatgtttccatgtgaactagctgaatctttgaagagcatgacttttacactagttgatttttacattccaaaatttttactatgtaaagacatcagctagtagataattaaaatgacccctatgtcgatagtcctccgactggtatttatagtgtaggttgtgggttgaacctcaaccaagaacaggttaatgtcttctgtaaaaagttgggttttaccattaagtagatgaaagccacaagcctattagttcatttgtattgcttgctctcaaaacttttcttgaagggccttaacaatatttaggtgaacgaggctttaaacttttcaaggctcaggagagagtgctggttgaaaagtataattctgttgttagcttgtggagaagggtaagtcgcttcttgatgtgcctttttttttcctttgttttacataaaaatattatggcacttatgtttggtttgtatttaggtttctgctatgtccaaaggattacgatatggtgatgctgtaaagcttacttcaatgctcgaggaggcttctcatgggtcagtggttcttatgctgcgtacaggaaccttttttttttcttgcaatccattttatttcttgaccttgagattttttttaaagcgccgaataaaaatatgaagggattatagcttaatgttctacttctgtttatttattattcatttgatgaatgggccaatatcctcaactacaataccagcctcattagttgtctggtattctggattctcatgttgctttctctttccagatttgctaatgctgttaactcaaccatttcaagtctacaccctgtgcaatgtactcgtgaaagaaaagtcgacgtgcagctagacttgacaacgattcctgctttcttggctgtttttctgctgctctggtttcttctacgaccaaggcggccaaagcccaagatcaactaaaccagctaattttcagtgtggctgttgtatgctaataccgaggacgtgaatattgtgaatatgcacacatgtcatgggggacagctgctgctggagcgcagtaagtcctagattcaaaggggaaatgacaaggccgtaaacgacttgtgccaaacggtgtcactgtttagagaaaatagaactgaaattttgtttccgaaactggtgcaaggtttgaagttgccacatcctgagcagacttgtgtagtgcattgttggacttgttctggatggacgttgatatgaatctagttgagtaagcactgtagagttgtagactgagccgcttactgtgtagagaactcaatactgtttttgttttccagagaacagcgggagaacatccctaccaatcttgtcaattgactcaattctattttggtttggttcttgagacggaacatttcggatgtgggtccaatcgctgacacattaacctggactcgcatatcagcgtcagccactaaggctgagttcggatgggggagatgggaacccaacttctgtgtacgaaaaacggagcagtccattaacgcgtgattaattaaatattagctattttttttaaaaaaagggattaatttgatttttttaagtaacttttgtatagaaacttttttaaaaaaatgcaccgtttaacagtttgaaaagcgtgcacgtggaaaacgaggggaaggggatgggaaaaggtgcatgcgaacacagcctaaaccagcagtactgcatacctgtcgagcattaacaaacaatccgtgggttaatagaataatatgaatctattagagcaaggtcaatagtaggtcaatagtatagctgtatagccagttaatggctccaaaaaatttcatgtcacctagagccatagctagacacatgatacaataaaaagctgcagtgatttctgaatattactttccattttatttattgcattgcatgttcttcatttgcatatagcaaggccaactgctcatctatttgctagctagggctgtttggatcagggactaaaattttagtccctgtcacatcggatatttgacactaattagaagtattaaatatagactaatgacaaaaccaatttcacaaacctggactaattcgcgagatgaatctattaagtctaattaatccataattagtttatgtgatactacagtaaacatgtgctaattatgtattaattaggcttaaaaaatttgtctcgtggttagctctcatttatgcaattagttttattattagtttacgtttaatacttctaattagtgtccaaacatctgatgtgacagggatttagtccctatatccaaacaccacctagtcgctagctgaatctctctctctctcttcaacttttgctttcaacttagttttttaagccacggaggacagctatcgccggcttgaagcatctattgcacctgctcttgttatatagaattccctccagttattaatatatacatttttacactaaaattagtgttaaaaggtaatatattaatgaccaaatggagtaccttattgaatttcatttgtaatcatgtttaaaaaatataagaattcataacagatatagtttaaggcttttaaaagtccacatatagcttaatatacaaaagggataaatctacttgacccctaactactgtgtttagaaacaaccctcaactctaaaattgggtattgaacatgtctcaactcttaaaattgattaatttgcccccttgttgttggagcccaccctctcagcgaatgttatcttcccccttgttgattaattgagcagtactgccactctacactcttttctcttctcctcctaataccactaggcatcgggctagatgtggtggcaatggttgtcatcattgcgccatcagatgtcagctcgatgaggcgccacaacccttggcgctaagacgttagacctcaacgccaagattcgtggctgaagttaaggtccatttctctttagtgtttttatggtctatttgtgaaacaagttttataaaagggctaaagtgttaaatttcacaagtgaagtaatgagcacaacttcggccttgtttaaagctaagacaaatcaagattaagtgcgggtacgcaaaataagacaagtcgttagtgcatgattaattgagttttaattattttaaacttgaaaaatggatttatcctattttttaaagcaatttatgtaaagaaagtttccgcatgaaacacctttcatcaataaaccaaagatagaatctgcatagtaataaaaaaaaacaatttggttcttgggggcaagttcaggtgacccacaggtctcttttccatcccatcccgaagccctagaaattgtcaagccccaagggacataagagcaagtttaatagtatagtcaactactggctccaaatcatacaatagctacctataaatatatactacacaattaatacctggtcccacctagcatacacacatgcatcttggagtccgtgctccagcttctctctcctcttttatcatctcaaaatgtgtttatagttggcttatagcctgctattgtacctgttctaagagcttacatagtgtggggatgtggggaatggtattgcctcaccatgttggatccacgtctccacattagtcaaggttgtgcacctgcagagccacgcgtgtcttctgtgggggcacgagcaccttatcaggcagaggctgctagcgcatggaggcacgaaacaagccatgttgagtgaggccgcgcctcacggcacggtgcttcatccctcccccaccaccccacccctagcacagagcacccaacaaatagctgatgtagttggaaaaggaggggaaaatgagcacaacgtgggggtagaagcgaacttaccgcaacagtgcgtgaagctgatcaacacgaacccgttaacgacgaccaaattcgcgtcaacagaaccgtccccgacccaccactctgccgccggggttgccgctatcaggtcctcgcaccaagcagatccgtcatgtcgccatcaccacaagcggatccaccactgggcattggcatcaaataggaagggcttcacccatttcttaaggggtgatagcctcaaagctcgttgactgtgctgccttgatatgtgccaccttgtaggttaggtgcatgatatgaaataaaatagggtaattagacatgtaccgtgtattctaggaataaaaaaaagtaaattacatattaattgagtaataataagaattgtgacttgaacactcctctaaacccgaggaagatagtggcgttgtggcaatgcccaaagttttcatgtcccgtgatgaccaaacaattgtccaattgattggcacgctctgaccctgatcaattgatcgatgccataacctatgttgtgaatatattctctctgggcaaatgcagttcggtgaacaacgaatactgtagcccacccatgggcgcgggtctcctaggaaagtgggctgtctcgctgctgtagcaggcaggcaaacctggccgtggagagcaacatgatccccatgacccttttacagcttgcaggttggtgaggttacaacttgcggagctgctcgttggatggtgcattgatcgaatgcctgccattcttgttgtggcctcaattagaatttggcatgtgtgactcatgagagctatgtgcacatgtttagtaccgccttgctggtttagcaagggtggaaccaacttaaaaggcctcacatccctccaatcaaaccactcctgggttaacccttttacacgaaacgagaacataagtgtaagtgggatggtatgtgtaaatgggcccgctagttggatggcctagttacgcggttttggagggagggttgttacagggcacctcccctgcgtgatcccgaaccccatggccacctccgtgatgcttggcaccaggttaggtgatcaaatcaaaatggagccatgcattgataaatagcccagtgtcatagcattgccatctcggcgaccaaatgtggataaatcagcgaaacgaacgggtggcgccacgcgcggctgagtctcttgaggaggttagaacgttcgtcccttcatatttgtcggagggcggactcctcgagcgggggaccgtgggaccccctttccggttcggaccggggacacgggtgaaggatcgagatccaatgagggaatgagagggggtcaggcccctcgggagcgatgggagatgcagagggtttagacaggtttgggccgctatgggagcgtaacaccctacttctgtgtatagttgatttcgttgggagaatacaagtgctttatgcttattttgggatttgtcctctctccactggggcatggacctctttttatatcttaaggggttactacaaaggtccaagccctagcttcaacggcaaggaaaacattctttacaggcaattaatacttatcctgtcttccgacgtgcggagccacgcgcgccttaccatagcatggacccttcccatcacgccgagtgacacgggcgcacacccgtgtcattccttcttaattaacgacgacttccgcccgtcagttcccaccggtcggcggtgatctcttcgaagggatcagtataaggggatttggtctgggttcaaatgagaggcaaaaagcccctcattaatggcgattagacggagcgtggcgcagaccacgctacctaacagcagcaggcgcacgcgcagggcgccttacccgccgtcacatcaatcattccggcttcaattggtagtgcgcctgcacgtcacatttaatgcaacgtgccgcgcttactattgacggtcgttatcgatcagttttgaccgtcaatattaccaaaatagaggagaactagtgatgcttgcaatgcataaatatgttagaataataatattccactagtagtaggtatactaatattttgcagagaatgacactaaagtggaggagaatcgacatcaacatagaagataaatcaatcggacgatgtcgagaatcagagttatgaatgaatgggccaagaacgcagaattgacacgatgaattatgccaaaattcacaagtctacgaagtgaagcagcggaggaggccaccagccaaaatgtgggctggttgggccgactcttggttcggccgaaccagggggttcggccgaacctatgccagcgccgatggatgcagggttttgagggaatggtggagattcactccctatggcgattggagggtattaccgacctttccaaccgccataaccgtcattacctgcctatttaaggagttcactctcttcacttcaacacacacctcaagcaatagctctctcatttctctcaagtttagtttagtagtatctagctggtggaataggaatagagtagaaatcaggagtccggaagtcttcggaagagttcgggtatggctctagtagctttcctttcctcttttgtaagctttgtacttttatgttcttctaaatacatttatggtattgaaatactttctgagtatatgagtatctactttacattatgttcatgttatactaaatatacggctagcttatctgggagatactttggtgtgggtataatgtttgcttatgcaattactctatgtcatgatgatgatattagagtagtatctggtagtttaggcgcggtgtctagattacgggatatcattatttgttatatattgcagatgagaggtgggccgctgatggtgacagctcagtacgggtattcctccgcgccggtatataatcctaagttaatttcctggggagggtattcctccgtatttagccctggttgtatggttatgacgggctgtcgtaaggaactcggcagtcaggggtggcttctcgaagtaccaggagggcatcggatagagggtattagctagtatagcagttaactagaatgtatgtatactatgcatattagaagtataggaatagattttctttctcttttctttccacctagctaagataatatattatgagaatgagtagtaatgcttgtgtgtcattctaccattggattatcttaacccctacttagaatatgattatcacaagtaatatataaattattagtcaagctctctctacatgattttcccacgggataaaataaatacgatatccttggaatactctcgggtgaaatgctacaatggtataaccgtgtgcttgcggatgaactctgtaaccataatataccaggagtatttctgcgccattgctgggaattatatttctagtaatgtcgttaaaaaataccaacacttactgttctcaataaacgtagtgggtgggcgctgggagtgtccgcccaaaccacacacgtgtggcggtgcgtggagggggttgaggcggcctgacccctttcgtgagggatagccagcataccagccccggtgcgacccccccccccaaaacccccgggtcgaaaagcgccatgtgggcttgaggcagacttttccctttgtatgtagtacctcaggcccatatcaccgataatattgatctgccgatttgtctcgtgcatatcaaagtaatatatgttggttgctaaaaggcctcgcacatgagaatgagaatgtaagttaaaaatcctcgcgcatgagaatataagtttaaggaataaagatcaagtgcagaaatagactgtgtcgcatcgcatggcggaagcaagatgaactggaaccgaacacgaagaggggagcgtgcacacggacagaccaacgacgtggggttggaagcagatgagcactgagtcgcacgcgtcgctttcggacgatggatgatcacgatgtgatggacggaaaattatcaattttttaagtagtttagattagattaaaaaaggaaaagaaattagagaaaaactctaatcaataatgcttaattcttcttaagttcttaaaaaaagagagaaactctttccagttttgaaaatagaaaaaaaatagggcaactgcaaattaaccactgttttaaatcattattgcaagactaccactagaaaattacaaaataacactagaactgtcattaagtggcatccttgcaaaattaaaaaaaccggtagtaaatttgcaaatgccaaaaaaaaaatacgatcaacgtatcacttgctgccttcttggaattgccttctgcgaaacaaaagcgaaaaaaaaaatcaataggtacatgttaaagttatatgtgggattgtgggtgccagtggtgcggccagggctgttgtattcgcgagcgaacatatgtttgacctgaacgtagagtcggctccacggcggcgcatgaagcaccaacaacggtccaacggatggatgaaaaactaaatgtgacgatttaaaaaatctttttttaaagtaggttagatagatgtactaagagcagttttatattggatgtgaagacacctctaattttatccacatcatcaactaattaattaagagatagtatatacaataaattacctctaacatacttactccaatacaccatattaattttactatatttatttcctatcaatttattgacctcttgctcttatctctcctgaagtttatatagaggctgccaattgtatgagatgtggttccttctctctttatttctctcatccacctcatcatatgaatttatatgatactcctagagtagtaactaggacttaattaatgagtttttatttcgtgtgcactggaaatttctttgtaagatgactgaatggatgcggccttattaacgattaaaatgcaatttatgaataaaagttttatatacatattcttaatgatttggaagtaaatgttaaaaaagcaaactatgatgagaaagtcctaaaatttacttaaatttaagtctaaaactaaaattttggttatgcttgaaggctgtacaacggggatagctaatcctctatcctcttcggaaaaaaaaaagaaagtatatgtgactttttatagtacaataaatttggacatacagtgtggccccaccaccaccttcctatccactcttccatcgtggggtagcgtagtactactactccctgcgtccccaaaatattactctctctatctatcattttgatagctatatttttaaattaagaaaattatttaataggcatatttcaatctaaccgtctatcatcttaataactttctcggatttaatgagaaagtaatctcatagcttctaatttctcatatactttatagcaacaaaattataaccatttgaaagtaaatttaattctcaatctaatgatatattttttaacaaataaaattcatttcatattataagtattggccagatgttttaaagattgaatcttaaaatacaagcacgtcttatattatgggatcgagggagtagtaacctagtagagctagatggaaatcacctaatcctaacctagtagagctagattaaacatcacctaatcctatgtgcatactctctcagtaaaagaaaaactctatctgtaaaaaaaagatgggacaatgaatttggactatcctttcattgttctgggagatctcctcctaggttgagttttttttatagagagagagtataaatctagatattggattatcttcatcctaaaatataataaattttagctataaatataaataaagagagtaatacccatctacttttagattattgtattcttgtcatagactgaggaagtactccctccgtcccagtgtataagccagatccatctaaaatctcttactccctccgccatataatataaaagattttggatggatgtgacatattctaggataataaatatgtcgtactagatgtttatattatctaaacttatactccctccatcccataatagaagggattttgagtttttgcttgcactgtttgaccacttgtcttatttaaaaaatttatgcaaatataaaaaccggtaagttgtgtttaaggtactttggataatagagtaagtaaaaaaaaataaataataattctaatttttttttaataagatgagtggtcaaacactacaaacaaaaacttaaaatcctttatattacaagacgaagggagtagtatattttaggacggacagagtagcagtaagagcaaggtaaatagtgtagcccactactagctctaaatcgtctatagccaatataatagccaattcatacaatagttgtttactatactattaatacctgatcccacctgtcatacatacactacgtcttgaagtccgtgctagagctggctacaaatctatagcctgctgctcttctctctcctcatttatctttttaaaatatgtttacagctggtttataacctgctatttcacttgctctaacaatagaggagtagcacacgccagtgcatcgccaccgatgtgacccatcaatgcttacgcctgcccgattcccacgccacgtctcgtccatctgaccaaccctgtagtactccacgtctctatggcgtgtctctagttctataccctcctctgcggctgccacgtgggccccacaccacgagcggcgcgcctaggccgcctagctatactactactcctagtcctactacaaagcagagcactgagcacgccgtcgcggctcaagcttagctagtactactccagtagtaactgccgcttccctttccccgttcgccgcatggcaccggccgccggtgagcccagtgcagccgcgggcggcggggagggagacaccgaggcgcatgcggtgatcgacgtcagcagcagcgaaaccgactccgaccccgaccccggcttcggcggcgccgggaagaggccgcggcgtgtggtggcaacggctggcagtggccgggaggcggagaagagggctaggattctggccgccgccgttccaccgggattcctcgatccgctaccgcggccttctgcccctcctcctcctcctcctcctccgcgcgggaggaggagggtgacgaggcagttctggaatgccggggactacgacggcaagccggacctgctcggcggcgacccttcgctgcgatccggtaccgaacagattctcgaagcttctactattaccctaatactaccttcgccgatgttgctatgcttccaatggatagaaacggagagtattgttgcagcttgcataaatcgactacttgcttcttcaatgttcatgcaaaagtactgcatcaagttacatttaacccattgtcaatcccagccccaatatagcgctgtgctactgctagagagtagagaattagattatggtggtggtaaaagctggaaaaaaacatgcatggatggactagcttttcagggatatattctgctttctgcacaaagttctaatcttggtctatactctctagttcttttcacaacgtaccttgatgctctgtttctgttgcatgttcttctgtgtgggagtcaactttgtttcaagacagtatgctgttacaaccagtgttgtggatgacggaatacggatgtcggacggagagggtaccgtcaacgattaatcggaatacggacgattaatcggaatttggcggaaatttaacgttttgtgcaaatatgtgtacatagctgataaatagcttgttttttgacagataattgcgtataagtacatatattgactatatacatactattttcaaataaaacaagcatagcataaagtgtaggtctgaacattcatagtggtacaccaaatactgataggtttggtttgcaatgcataaaggaaatattaaaagcatgccatacggtatcaacaacactaaattaatcccaagtaacatatcgattactcggaagaatcgtaattacgcctggttagttggctgattagtcggaaacggtcgtttttttagtcgctaatgacggcaattatgcatactggaacgatcaacaaccaccgtttcatcaaaatgtgacggagatgttagcgtcaccgtactaacgtccgtatatacggccgtatcaaccgttatccataacactggttacaacaccggatacattgctttttctgcttatagctgagatacatttgttgttgctcactgagattttccggttgtcagattcgggaatggaccacattcgcgtccatccaagatttctacactcaaatgcaacgagccacaagtgggcactggggggtacggtctatttttcccatttcaattatctactaccgaatatatgcccatgcatgcagccgaccataagttcgctaacgttggcagcaacaactttgttaatgtatgctctttactaacatgtgcagctttcgcggagcttcttgacaactctctggacgaagtacgacttgactgaaaatagaacattgtttttgtttactgtgtcggttcctcttgcttactcaggcagagcatttctttaaaaggttgcgaatggagctacttatgtgaacattgacatgttggagaataagaaagatggaactcgaatggtgtctgtggaaggtgagaaactatcttgctttgcatgcatgggtgtttagatttatttgacacaaggcatcagttttcgccaaacctctgttgtgaatcaaatccatcttctacattgcttaaaactgtatctatttcatacccccaaggttgaaattgatactccctctcatcccaaatgtaggtcttttttgaacctggacacaataattaagaaaacaatcaaatgactttgttgctcttcatttatattgcattgggaaagttgaatcgctttatttgcgagagatatcatctaggagtatttaccaagggcaaacaaggaggcatagttgaaaagttgagtagtatttagtaaagagttgagaaggctagaacgactagggttgttcatgttccattttccaaacccctggtttaacatgccacatgtgacaatattgagaattgaatgccaaatttcagttcatactaaaccctattgcatgttacattctagaattggttttgctgtccacagttctaatgaaatcgtgttattttagatgcttgtaaatgtgtatatcatacctgaggtttcattctaaattgattcatagatgatggtggtgggatggacccagataaaatgtggcattgtatgtctttgggttattcagcaaagagcaaggtgaaagataccattggacaatgtaagttttggtaggataattatttagccatttagccatttagccatataaataattgatctgaatccacatgcttttgtatctctatcaaatgttgtattttaatttgctcaactcactcatcagatggaaatggtttcaagacaagtacaatgcgactcggtgctgatgtattagtcttatcacgtagttgtggtaatggcggaagaaggttatcttctgttaccttgaatacttcaagatatgtgttattctgattttttttctaccattttccatattatcactcctccattcaaaaccaaagcatgtttctgaatatgtcaactcaagctttcctagcttgacaactaatagaagcaaaagtactttgacaacataaagttttttatggttttaggcagcataataatatactttttttcttgtggcaaatattaatatggatggtatagttctaagctcaggatctaccagagagtgcaaaactttgtttggcaaaatcctgaatgtaaagtcagcaacatttctaactgtcgcgtcttcccattgcatccatctgcgtcttcccattgcatccatcttcaggatgatggtcgcaggttttcacttttcaatgtcaccaaaccaatttttctttaaagtaatgtgtctcaatatttcatcatcatcttggccaagtgatatataattatctgactgtcgaggttagaacatggcaagttctttctattcactgagtacaattccagtaaatatttcctgataatgtgtaaacagtaggttcctgtcccattgtgtgaacacattttaatcttgaccaaattatgtctcgtatattttgttccacatggacaagatgctgatccttttccctcatgacctggttggcataaaaggcgcacacaaagtattggcatgctatcttacacattcctgagagagaccaggaaagatgatattattgttccaatggtaagctcaatttcatcttgtgttgttgtatcaattttaccattttacagactggttcctttgacatcagttaagttagctgattgaatcaaaactctgcaattttagttaatgtcttcctttattcgttttaaccacagcatgcatgatgtttgtataccttgcagattgattatgaaaagggacaacaatattggaaaaggatgatgaggacaacatcgattgactggcagacaagcttagcaacgataatagaatggtccccttattccagtgaagcagaacttcttcaagaggtttatgttatgttatgttgtatttatattatattattttattggttctaaatgcggatatagctgtgttttgaatgtgttcggaatagcttgttcattgtttgcagaataaaggaaagggcacagctttgcaaacaaaaacatacattaccaatgtagtaaaaccaagttactgttagattacgcgacacattgttgaacctggcatatcataaaaataaagtactgatcgttgttgctgatgtctcttcttttcttggcttagttccttaaatgattttttttctctgtactttgttaccgttgtcctcatcttcttttctgtgtgtctaatggctttataatagtacagtttagctcaatcaaggaacaagggactcggattattatatacaatctatgggagaatgaacagggagagttggagcttgattttgatactgatgtaaatgtgagtgccaactaataattaatgaagtcatatagccagcaacagaaaatgtggttaaatatgaaatttagtgatgtttgagatggcaggatattcaaattagaggtggtaaccgagatcagaaaaatatccagctggcaaagcagtttccaaactccagacatttttttacatatagacattcactgcaggtaggttccagatttactttgtctgtttgtgccaaagcaatgctctgaatgcttttttttttcttttttcctgaggaggcctctgcagttaatgtatcaaaagaaaaaggaaattttagtttcaaagagaaaaacaaaaaaatcatggtaaaaagagagagaagaaattacagggaagacaacaaaaaaagagccctctactctgaatcataattgatattaggaataccatttaatgttggatggctacttattttcttagagaacatgcaaaggcactgcatatcattttattaaggcagacttagaaatgataacaaggcttggttgattgtagtgctatttgctaatccactaattctatggtgaattttctgcagtagaaaagacagtagtaagcatatgagccataaatagttcattggaaaatttagcacacttacataaattgtgcagaggatatatgtcaacctgatgttacttcctttctgcagagctatgcatcgattttgtatcttcgagttccatctgtattccaaatgattttacgaggcaaagagattgaacatcataatattattggtgacatgatgatgaagaatcatgttatttacaaaccagtgatgactgatggatttccgagggatatcgatgtaaagattacaagttctgtacccatcgtttcttgtatagtgatgatcccttaacatattttgtgcatggttcctcatctttgcatgctagatgatgactgatgttacaattggttttgttaaagatgcaaaacatcatattcccattcaaggatttaatgtttaccacaagaaccgcttgataaaggtattcatttagttatgccacatatatattcttatgatgatgaaaataaatacatttttatttctagcttctaaaatgactgcacatccatataccaattttacaattaatggaaagtaaatagatttgggatttgcacatttatgttctatgttaaatttctctgtaactcttatgttttaagctgatctatttttggagtaaaatgcaccataggtccatatggtcctgttgtcaattgggcatcgcacttgggttcttcaagttgcgggcatgtcgctttggttcctacttgcaagctgcacatataggtctgtaattttgtaaagcagtgtcaaaaaaggtcaaaaaccttcggtagttaaagatgatatgataacttagctcaatctaaaccacaatgtgaccatgctatcacctttttttagataatggaagatgagggatacatctctggtggtctggcctatgcagaatgcacccagccaatgtttcaccatttgaagtcattgggaaactaatatttttttgtttgaataataaagtttgtttctgcgtgccgttgattttcgatgcttctaattgatggtagttggcaatagcattgtcatattttagcttaaataggattgaggtgccacatttccaattaagctcagtgtcagcttctattggtacacctacacatctaaggatctagatgtgcaatcatcacgttgaggataaatgataacgtgcccacacaagtttatggacttatcgcacaccttatttctcttattacgcttggtaatcaactgaatatttcttgttctaagcatggccatcagcctgtcttaggtgattataacagtcaggatacgagtctcatcagaagtatatatgtttttttagcctttctggagagtgtgggctctacctggaattcaagggcgtggtgttataggtaagaaatccttctataagcccctttggcacaacttcttcatgtgtggaaagctgatactggaagaagctggtgacagacagcttctccttcatagccgtaagttgctgcagaatcagattctgtcaaacagcgacacttcaacttcttagtggagaagctgatgtagaaattgtgcctaaggggtctgtaggtcccttcttcagaccatgtgtaatcattataacttgcaggtgtacttgaagtcaactttgtagaaccagctcatgataagcaggactttgaacgcacaaatagccttgcaagactcgaagcacgattaaatttaatgcagaagaaatactggtttgtcatgtcgttttgcattgtccatttgttgtctgtaggcataccagttctttgaagaattctaattagagtctaattaccatggaaaacacttacttctgtttcaggtctgataattgccatcgaataggttatggtggcaattctgctaacagaaaatctgggagagaatataaaggtaggtagtgacgcagggctccctgcttgctttatttggattacttggtttggttaatagcttaatatttgtatttttttttcaactacatagtacaaaacaagataaaccaaattggtttggaactttagatagccctgaacgcatgcatgcatacctttgaacctagcaaccttagttctttcttttctttgcgttttctttttggcagaggttttcttttacacagtttttctgcataacctgtgctaacaactgagaattttttttttgtttcattctaaggacatactattatatgttgattcaaacaaatacactggcatgcatgtcagttggcaacttcccttgtgtgttcatgtttgtacatccattgccaaacatatgtcaagacataggctaaatatgctaattatatagttgatgcatgagacaattgctttattaagtaccctattattttgttggaatagagacacctgaaaatactccacacacaggaccaacatcagatcaatctcctgaaggctgtagaagttcgaattatttgcaaagaaaaagaagttttggaagtccatattctggatcaagtaataacaatagcaaaactggaataacatccttgaacacaagtaaaataagtcttcctgagagcagattctctttaagaacaacagctcagcagacagttgagaagaccaaaaggaccttaagatatacgagaccactactgcacggtctatcacatacaagtaatgatagtgatgctcagacttcaggcaccccatcaagatcaacttctcatattctaaagacacctgaaaaatcatgccacaatgagaatactttgcctttaattccatctagtgaagcaataagaagtgaagggacaacaagatatcagtcagaggtatttgtgttcctctacatgtaataaactttgtttctgtttccaatatttgtgggtatagtggtagttaaataagctttatcatgatcttacacagtaagttgcattcataatggctgcaacatagcagatagcacaaagcttggattggtttttggtagatcctttactgttgaagtgttcgatttccttttggcctcaggaacaataagatgaatgtactctgcacaacttatctcactatgggaccaaaaaaaagaaaaagaagcaaatgataataccctaccttgttcttttcctccatcttaattacattggatgacctccttcggtcatcccgacaaaaaaaaaaaaacataccttgttctattccagtaattatgtgatggaaaatagttgacatgggatgatctctcatagttttactttcttctagatgactgtttcagtagagatgacctctcaccttaggaagacagtaacattcctcccattaaaagttaacaaagtatgtagtaccagaaaaaggaatgcagatgagtgaagtttaagtacagtgtaaattatagtaagaaaaaactgaagagcaatgagagatggtcattaaagatgtactgaatgtcctaatctatccttctttacattttgcaaattttccttggtttgttctttacatatcaagagcatttttttttccttttgagacaactgatatatatgctttacaggaaagaaatgtaacaaataatggagatggacaaactgttgataaccctgagacagttatcaaattgttgaccgatgaaaattcgtcattaaaagaaaggtagctattaccagtgcttcattcatttcttttttacgttttactggcagttgtatggacaataataggcggtaatcagttgaaatctgaaatcttaagtaatgttgagaggttaaatgttactgtagttgaatttagccaacatatgggtgtttattccaggaactttaacatttgccacatgttcctttttattcctttgttaacatcagtacccttttttgaattattaaaattgtttcctgatgtatgatcagcagaaacttgtttgtttaattcaaaattcatgtaaaatttttattttaaaatcactttatttccaaacagaagtatatgacaccatttaatatcaaacccaagatcatgaaagcttggcttagatatttggtttttcagtgttcaatatatcaaaggtcctaatccaatggattgcttgttaaaggttttccccaaatgacacttagttgttcgcatgaaataagatttggaacttagagtgacttttcctcttcattcttgtttttttccctgtgtgatagtatcatgaagatggaggaatctttgtcaagagaattacatatcgaacgggacaagaataagtctctcattgaaagggtaagcaatactaacttttacctgtggggctgttggtagtatactgtgtgcttgtcctgaaatttttactatttagcccttattcaaaacttgctgcaaaaatgaaccccgccaaaaaagttcaacaaaaaatggcccctgatctctgcaccatcggactgacactgagatcgcgatgttggcattgacccttgccacggtggtgggtggggagactggcgtggcaaagggggtcagcaccagaggtattggcgctaacctcctattggtaaaagggtaataggctattctatacaacgatgcaaaatgtggtgcagtggtgtgatgtctcatgctaccaacacatttattttcttctttatccaaatcatgcctatatatgcctaattctgaccagctaatcgaaagtatgttttatgtttagctaatgtgaactgtatatttttgcaaaagtaattagtacctttttttaaaaaaaaaaacaaagaatttgaacatgtgtgtgtatgcttaataatggtcattcaaagaagagggactcatcctaagaaggccttctttggtaaagcaacaaactactataaggccttctttgtgttgaaggtgtgcctactacatttttaagttataggaggttagtgccaaaggcctcggggctgacccctttgccacatcagtcagcgagctcccctgccaccaccgtggcagggtcggtgccagcatcgatagtgctgagtacctcagcgcgaggtcggagtcaatttgtggttaaagtttttggtggggttcatttttgcaataagttttcaaaaggagcaaaatagtcaaaacttcagcttgccatgcgttaccccaattacaggttaccagaattttattcaactttgcacctactgaggacaatttattctttttcactacagtttggtgtagtgatttatagaaacattttaggcgtcacaaaatatactgacatgacacatgcgatgcgatttactggagccaataatggcttgaagggtttgaaaggtcagactgcattatttcagtctttgtaaccaagtccttccatattttgttttccagttggagaatgttcagaagcaacttggaactgcaaacaaggagcaagaagcattggtagatatctttacagaagaaagagcgcgtcgagaccaagaggtggagaaccagcggacgaaactaaaggttagttagatcttaaaactgtagtggatttattgcgcgaatgcaccgatccaatccgccttgtcgttgaggatggcatcacggcataactaagctcctcagtcggcatagccatttttgatgtcgtctctgctgttccaggaggcgtcgtccaccatacagaacctgctggatcagctgaatgctgccaggagctgccgcaagaactagaaatggaatgaagaagatcaattacctcgttggtccattgtggctatcgccgtaaaataagtttcccttgtacatgttagaataagctatatatgtcccagatggttaattggtgctagaacagctagctgttggtatgttttatgtgcaaggtatgcagtgctgcattttccagtgctaacaaagaagggtgagtcgaccaccactctaaactcgaaaatgtgggagatcgaccatatcggtttcagaccttcagtatcattcgatgcaatactttgtctaaacttgagcagtatgtaaaactgtagttctaaaactcctatcataatgttagtctggttaatcttatatttttacgagttcaccttggtgtgtattatgtttctcggtattataattgtcttccgtgttgatacgcacatatgcttttcctatgaagtccattttttggtagtaaatttattttacaaaacattaatcatgaacttggtatatacatgatcaccaaaagcttatgtggaatatgaggtgatgaaccgaccggttaaagaaacagaattgtagatgtaggtgttgacgcagtaggtgaacgttggggtgaggaatactgaggatgttgccagagagtacgctggggtaaagctatagatggccaaaatggccgccccgcccgggggcggctgataagcgatcagccgcgcgcgcgcggtcagtcgcctccctcctccctctagtatctcatatatactactatatacattttatatatatatatatatatatatatatatatatatatatatatatatatatattatttgtttggtgctccatggtgcccgggcaccattgttgaaattgagtatatacccaattcaaatgagtatgaaactttttcaattacttaggtattaacattaactactttactaactagtttaaagcaagtttgaactgaatttgaacttgtttttgttagattttgattctaggtatatagcatccatacatataattagttaggtatgtaatcatggattgtgaaataaagttaaatttgagttgttttgttgataagtataggtatgaatcaaattattataactaggtatatactcacaatttgaaaattttgaaaaatttgagtgattttgtgcattagataccatggtgccccatatgagtgtcctatatatatatacatatgtatatatatctatacatatgtatatgtgtgtatgtacatatgtatatatatatatatatatatttcaatgcataaaaaatatatacacatatacacaaagtttatatacgcataaaatataaaaataaataaaaaaatacatcatgaatagaaagtttgtatacgcgtatatacaagtttatatacacatatagaaagtttgtatacgcgtatagaaaagtttgtatacgcgtatagaaagtttatatacgcgtatacaaacattctatatgtacgaatacaaacttggtatacatacgaatacaaacttgatatttatacatctcgaaaaaaaaaggaaaaaaagccgaacagaagagaaaccggaaaaataacaaaccgaacggaaaaaaaaccagaggaaaaaaccaaacagaaacgaaaaaaccggtgaaaaaaaccaaccgaacataaacgaaaaaaagggaaaaaaacaaaaaaaacgaaaaactcgctcctcatccctgttagagtttgtgtcgaatatgtgtacatagtcggttacagtttaggactaggagttgtaataggtattaggactagagtatgagtcggactctatccaaggttctctcataaatagagaggcatgcctgttgtaaccgcatggcgacttagcatagcgagagggagcgactgaactccgttaacaaatatcgtgtctcggtgtcgtcatcgttttggatctcctatgacgttttcttccgcgtttagctaacgatgttgatttcggggctggttttataacaagtggtatcagagcctacatgaggtccatggtagaggcgcgatggaggtgctccacaccgcgtagcctgctgtaatgcccacggaggggcattggcgcaaggtgaagcatggcggagatcaacggagtcttgatcggtggatcgaacacttctggcagcggccggaaccgtcgatggctgctttcaacagggagatgactagacgtggtgctcgggttgatggcggcggaagcgattggcgatccaatcggtgggtcagacacttcgggcgggtggctcggactttccggtgagctactctcgacagggagacgtgcggccgcacgctcgggttgattgaagctggaggcgatcggcgttctcgatcggtggattcgaacgctctgggcggggtggcccgggcctttcgatgagctacgttcgacagggagacggctagacgtagcgctcgggtcgttcggcggctgggaagacggcatgcgacttgtcggcttcagctcgcgactagattgatggcgtttcaatcggaagtcggagcgggtggatcctataggctgttttggaggtgttgacgaggtatttgcacgatggaattgcttcaaaggcggcgtattttgtggcatatggctgaacaaagcctagggcgaatagagcagcatctagtagcggttcaaccctggagaggttttggttcaacctgtttttccctctagcagacaagaagtaaaccacgtgggctgtagatcaatgacaacagttgttggtggagtcgtcggtggtgcttggcattggtgctagatgttgtcagagatacgaagaagcccaggaggtcagggtcgcggcggtgtgcgcgtcctgcgtcgaagccgagccggcgacggagatcagggcgatgccgagaaggagctggctagggttttagctaggtcgtgcagggttcggtcttgagggtttgtggtgtggaagacacggacatggagtcgtctccggttcggtcacggcgcggacacaattgaagacaaacagtggataccaagtttcaacacgaaggggaatcggacgaggactacgattagttcatgaatcggactcgattttttcccaaataaaagcagcagaggaccacgggattgcaacaacgcaatcgaaacaaatcacctagcagagggcgagattcgtacccgattttcgcaaaggcggaggtggtttgggcggcgaggtcacgggtggctggaggcgcatccttgcaggcggtgtgtggcggcgtggtactcggcggcgtccgtcggagctcgagcgagagcttgcggcggcggctgcggcggttcccgacgaagaaccggcgtaggtcttcggtggcggtgctcccaaggcggcgcggcagcctcttgcggggccggcggctccccaaggtccggcggcgcggcggctcctcgtgggtcggcacaggcactagacggcggcgggaggcgatggtggtgtgcggcggcgcaaggcagcggtgtgcggcagcttcggcaacgaggcggcggcgcatcgggtagggcggcagcgtgcgcaggagggaggagcgaggaagccgaagagaaaaggggatcggctcgatctgagccggtctttgaccgctgttgtctggtggttgaccgagtaaaggagaccgagtccggttttttggagaaagagaaaaaaaactgattcggtccggctggtactgttcgagttagtcggtggggtcgattgaaccagggcagatcaatttaacagggcaacagctattgagttgattatcgtcgatggcggcaacggtggtttccaaatttgaggtggtgaagttcgatggcaccgggaatttcgttctctggcagatgaggctgaaggatctgttggctcaacagaggatatccaaggctcttgaggagacgatgctggaaaagatggatgctggcaagtgggaggagatgaagacgcaggcagctgcaacaatatgcttgagtctctcggattctgtcatgtaccaggtcatggatgaaaaaacgccgaaggaaatttgggacaagttggcaagcctgtatatgtccaagtcgctgacaagtaagttgtatctcaaacaacagttgtatggtttgcagatgcaagaggagtcagatcttaggaagcatgtggacgtcttcaatcaattggttgtggatctaagtaagttagatgtgaaactggatgatgaagacaaggccataattcttctgtgctcgcttccaccgtcttatgaacatgtggtgactaccctaacgcacggcaaggatactgtcaaaactgagataatttcgtcgttgcttgcacgagacttgagaagatcaaagaaaaacgaggcaatggaggcttctcaggctgagagtttgctggtcaaggcaaagcatgatcatgaagcgggggtgtcgaagagcaaggagaagggggcacggtgctataaatgtcatgagtttggacatataaggaggaattgtccgttactgaagaagaggaaaggtggcattgcaagtttagcagctcatggtgatgattcagatagcagcagtcatgagattctcacagtgtctaacgagaagtctggagaagcgtggatgttggactcagctagttcctatcacgtgacatcgaagcgggagtggttctcttcatacaaatctggtgattttggtgttgtttacttgggcgatgacacgagttatcgtttgttggagtgggcgatgtcaagttcaagatgtatgatggaaacgaggtgctactttcagatgtgagacacgtgccgggactaaggaagagtttgatttcgcttgggagcctacatgagacaggttggttgtatcaggtggattctaataggaagaccatgaatatcatgaaggacggcaagactgttatgactggtgagaggacaagctcatgtttgtacaagttacaaggaactgctgttgtaggtggagtcatggaagatgggcatgctggtgttgctgtgcacgatcctgaaggcggcgagtctagcgtaggctcgtcaggcggcttggcgtgagctgcggcagaaccaactcaagtcctggtacacggaggttcgagcaagtaacagattcggattggcgtggcatattcgccaaggtggagtttgttagagtttgtgtcaaatatgtgtacgtagtcggttacagtttaggacttggagttgtaataggtattaggactagagtatgagtcggactctatcctaggttctctcataaatagagaggcgtgcctgttgtaaccgcatggcgacttagcatagcgagagggagcggctgccggcgtcgaccggccgtgagtcgttgtaactctgatacgctgtatatgctggatcggggaggagcacccgtaatcagtgccccagagatgtaggctacggctgaactccgttaccaaatatcgtgtctcggtgtcgtcatcgttttggatctcctatgacgttttcttccgcgtttagctaccgatgttgatttcggggttggttttataacactccctccggcgcgtcgccgccccctccccgcgcgcgacacgtgtccagtcgcgcggggagggaggcgcgcgactgatcgcccaatagcaatctcggccccgcccggcacagcggccgtgcctaggccaaggtcagtcgggccagcatgggcctgacttacacgtcaggccatgccgggctgacccaaaggcatgatattctatcgtgcttctctacagaataagtctatttttcctatcttaactctttgggctttgtctatatggctggaaatacatctattttgtatttctcttctctttgggtcttaccttatatggttgattaagcctattttgcgtccctctactatttttcttccattgtactgggccgtgccgacccaacgtgccgaggtagcagcccagacacggcacggctgttgggtcggggcggcacaggcacaaccccagtcaggccgtgccgtgcttgggtcgggctaaattgctgccttgggctgggccgtcaagcctcgggccatatggccatctataggtgaagcaacaaatgtcagtgatggcaaagcttgacgccttgtaacttaaacgccgtgattaggggctctactaagtcaaagctaaagctaaagttaaaatataaatttttaattttaattttaaagttaattttaagatattttcaacgtagtttttttaatattagcttttaagtcgctaagagcatcactaaccgcaatcctatttccttactaaaactaattttgagggtttttagtgaaaaaattggatccaacagattcccaaaagcactgcaatagttttggagttcccatccccatatatttcgctctatggatttgagggcgagagagtgactcccaatctctcgttcgcgtgtttctcctctcctttatgcacgagcagtgaaaatttctaaatttctgtcggtgatcgcgatctctttctgcgcgcatggaaggaaaaaaagggaatttctgttggttgtttaacagaagggcccagtttttgggattgaatatcttttggaggcaggagtattttcacttcctattttcagttttggaaaaaattttgggatagattattgctaatctgttggtgatgctatacatatacaagatttttacatatagattaattttttataccttaataagccgtttagggaatgtgagcaaccgacaggggcggagccaggcaaaaatggcatcggggtcactatagttcttattctttactacttacgtacaacatgtactatctccgtttcatattacaagtcgtttttttcttaatcaaacttgtttaagtttgactatgtttatagaaaaatatagtaacatttctaatagagaataaacattttatttaaaatatgtggtatactctctccggcccattttaagcgcaatcataaatttatgtgtccattttttatcgttagtcttatttgaaattttttttatgattagtatttgtattgttattagatgatacaacatgaattgtactttatacgtgacttatatctttttatttttttcaaaaagaatgaaataagatggatgactaaatttagacacggaaactcatgagcttaaaatgagatgaagggagtatttaagtccagatggggataatttgttttagttttcacgagggcatgatagaggaaagaagttgaagatggggataatttgttttagttttcacgagggcatgatagaggaaagaagttgaagagtgtctgcttaaagaaaactagggtttttgttaggaggcttggctcaagggatctgagccttcgttcctttttctctgattcaacggtggtggaagggtcggcacacagggccacatggatggttggatcaagcctcgtatcagatagtacggtccacgtgaattcgaacgtgtttgctatttcaccagatgatgaggggttttctaaaaaatcgctgacgtggcgctctcccagcaatcccacggcttttaagtaaacctatattacgtgggcagccagctctgtactacttctagttagtaatataggcttgtaggccttttatgatacacgtcattacctgaaaacaggcttgaaaagctagccttctaatccccaaaacttaatggccgagctagtggaacgagatggcaaaaagaaacggggtcagatcaaaattttcaccggggtctttctagcattactaaggtggtaaggtggtgtttgggaaggaggaactaaactcacaaaaattttagtccctatagaaggggtttatgtttttgtaaaagggactaaagttcagtggtggagccaggatttcaaagttgggtatttctgtctaacaaaaaaaaagttcatagtagaaaaaaaatcaatggttcacactatgtcaatactgataatctaaaaaataaaactacaaattattacatggtacctctaattttctacctcaggcacaacctcaactgcagtaatctgaatctgaactggactctcatttgcatatgtaatcggctgaacaaaaggaacagcaacttcgctatcaattctaacgggctgtgctgttgatccagaaccagaacctgaccctaccttcctagactttgaatgtctatcccacaaagtcttcaaatcaatcgatttcttcttcattttgagagctctttaatctacagaactacagaagtacagaacaaaaaaaaaaaactactcagagactaaggtaaaaagacatggacacatgatgagtggatttaggctgattgaatcttgaactcttgattgctcacctgaagttgtgcttgccgccgggcgctgtcccgttgagccgcagccgctggccgccgcgcccttgcccctcgcggcctcgctcccgctgtcgctggtcgcccgtcagttgccgcctcgaggcctcgccgcgccgccgccgaacgcctcactgcgccgccgctggtctagctcccgtcgccaatcctgtcgccgcccaccggaagccggttgccgctcccgccggtcgccgcgccgccgccgaacgccaccacctagggtttggaaatggggaattggggagcgggcgagcagcgcgtgactgcgtgaggcgtgagcgcgagccgagccagggactcaggaggagtggggacaactactacgtgtacatgtgtatatactgatgttaggtattccggggaatacacaggaatcactgtagctccgcccctgctaaagtttagtccctccttctcaaataccacctaagggtattaccccagtgagagtatggtagctccacccctggcaaccgaggaagctacgagatcaccatgcaggtggaggtcgtccctgatctttctttagcacctcaattaatagggttttatgggttcttttggaccggagatgacatcgagagagctctcgtacgaggtttaatcctcttatagtgctaaaggagatatgaacaatttaatttatttgaattaactgcgcaatccgatcaatgcacaagtttaagaaacgtgtgcatgagctcgagaacaatagtcagcatgtcggtgacccttcttcttacggactatccgtaaataagaagtcgtcacctcgccaatcctcttatagtgctacaggagacatgaacgatttaatttatttgaattagctgcgcaatccgatcaatgcacaagtttaggaaacatgtgcatgaactcgagaacaatagtcagtatgtcggtgaccctcctccttatgaactatcctattaccatacataagaagtcgccacctcgctggagatcacaaggaaggtggtctagaggagggtgttggtgtggactgtatagagggtgataacctctgcttccgtcatgagtgggaaaacttctcaagtgcttagtttttctttaaaaaaagtatgcactggatttggcttgaaaagtgttgttataatatcataaaacttaaattatatatatatttatcttcgttagatagttgaagttttaaaagtttggctcctaaatgctagtaaatatttatgaccaagcacatgtttagtgcgtttgtatattgaaagaccaccacataacaacgagccatgtgtttatcgactcaaataacgattagctagagtattatagttcgagttcgtcaaattgttaaagtgccgtaggctcacctgtctcttgaaccgttgacgtcagtttttttttttttttggcatattgtcctaaattgaaacgtctcgaatacgtcttgttgcttattatttttaatctcactctttaaccgtcgatctggttaggtttactttggaatgcaggatatgaggtttactttgcaaaacaggataaataaaacataggaataggaaagttatagaaatataataggattgtatatgtatatataggattatcactaatctcagtactttatagcatgctaagccattgctaatggaccacgcaggaagtaaaaaattaagtagcaaaataactgagtgttgtttctgttcctagcatataggaaaataaaaagaaagaggtttgactggacggtttttttccccgtaattttcctttgagttcttcctatgtcccaaaggtaggaatagtgcctaaatcctttataatgtgaatactgagtttttccttaaaaaaactgcaatccaaagtaccctaattgtgtttctcattttccatctaatatttccatgttatatctactcactcttacacgaatgtatacaacatactaccgctaattacaaatggttctgttacactgtttttcccaaaaagatatacgagttctaaatgactttttaaaatttagaattgagttaaagggattaaattactccatccattccataatataaggcacaaccactttttttaaatgttccataatgcatgcaattaactatgacatattctccattaaattattccttttttaaatcatccactctcatgttatctaattttattggatacatgagagtatcatgcagatttttgagccaggggatcaacaccaaacaactcagatttttcagcagaaaaacaattacaaaaaaatatataaaaagaaaaaatagggatagcaagcctgccttttaccgagcccaaccacccgaggcccattaacagacccaaaaccaaacttttaccaagacccattaacaggcccaaatatcatctgagccacattgaacaaacaattttgctatatatttgtcgacaaattttctcccaaaaatttgacagatataattacagtacaatcgtagtgtaattacattgtaacttacatataattacactgtaactataatgtaacttgtatgtaactttcaaaaatctctttgtaacatgttatttcggtaaatgaaggtcatgggaacaaatcctttcagtaaaatggaggttatgggaacaaatcctttcacatatgtatgtgctgcgattttttttcttcctcaccagaacaaatcttgtaatagatctaatgattcaaaattacgtgaaacttatatacaagttacaatgtaattgcatacaagttacagtgtaattacactacgattatactataattaaatctattaaatttttaggagaaaatttgtcgacaaatgtatatgtggtcatgcaagcccaaagcacgcataccgaacttaaagaaggcctataagcgtgaacgaatctcaaataaatcaaacggtctaaaaaacgaatgattcagcgctcagaaatcattcgactgctgtatagtctttccgttattaggatgatctaaactacaagatcataataattattttttagtctttagattaagagtggttgtgtcttatattttggaatggagggagtcctatatttaaaatcggagatagcaattactccgaattccgaaagctcagtttgacatctccaggagctcatcagcaaaatcctggacatacgtaacgcacggaaaaaaattaaaaatacacctctttttcattggttttatataaatatacacgtttacgaagattttgcacaaatataccactgtcgtgaaatgaaagtgcgagatcgagctaattacttgatctcgtgcggcaggtgtgcgagaccgtctcgcgcgagaccgctccttcgcttccctaaccaccgtattcgcgtgagtaataaattaattagtgtcattagcagttaattaattaattaatatttatttaattaacatcattagtaattaattaatcgttaattatacgctaatcatgagccatgtcaggccatctcgcacgctgctcaagcgagatcgcttcttgtcttgccgtcacgccggtctcgcgtcctggtcttgcgagaccgtgcggtatcgcttaaccatcctggcctatcgtcacgctatcgttactttcgctgaataaatcagcgatattgtttcgcttttgcactttcaatcaacgacgatagtatatttgtataaacaaaattacatctcgaatattaatgagaaaaaaataaaaaacggtatattttcatatttaattccgtaacgcactgcctagcgagggttggccaagtttcgcttgggggagtagaattctaggtagacacagatatttccaaagcaaacgaaacgtgtcgccttccctccttcccaacggggagggttccgcacgcctcctctctctctcacacacacacacagccagccgggtcatagggcacgtggggcccacctgtcagctgccgatcgacaaggacgagtagatgatcttctgcgacgtgtacgtgagctcactggcgttcctgcttttattaacgccgaaagagacgacgacgactttttgtgcttttatttactaacccttgttgttgttgtttttttcagaaacgtcctccataaatcgtacagttgtttcgttggttgctgttatcgttactgacttcctgtgcgctgaaagataccttcggccaagcgggctaattgtagcgtgtgtagcttgggaataaagtagcagaattaatttttgaaataatattatttttgaaaaattgtaaaagtagaggttgatgttgaaacaacaatttagcaatagtaaaatggatagcgaacaagcaggaaagtggatgggttatgagacaaatgatttatacaagttcaggccttctcaataagaataagaagtaataacatatttctgtttgaggatttgattcacttattttggtattgatctaaagatctcaagtgtggttatgttcacaaggggccctgccttccttagatagtcggaggagataagattacaagatagagactttatcccttacagtctaaatccctataactactttacaatcgtaactgactaagactacatgatatttccttgatatgcaggttaatacaatatccgagtcttagcctatacatattctaatcatatgatatatcccctataatcagttggatagtctagccttgtgggtatatgatacccataatttccacagtagcccctgagaccttcacagtctgaaacaaaacccttctctcaaactacattatataacagccgaatgcttcaattcttcctcctgcaatctcccgagtgcttttatccctagtaggttgtgaagggctgaaaaataaaaattaggtgcatcgactagatacacctaattaggtgtagcccccgactatgagattagttgaataaactaaacatatagtcaaggataaaataaaataaccaaccgagtggtttataacaattatagtcatcaaaatgacttaatattatacaacacatattgtgtaaatccttgaataatataactcaagtgatatatcgactgctttttattaaaaaatattccaaacatatattcaacctaagccataaggttgattaataaaaatatgcacttacgtgacaataagcaatgatattgtatccaatcaattgctaatataacctaagcagtgtgttgacttataatcatataaaaaagtcagcaggacagttatgaaaaacttcattgctaggcaccttttaaaatacattgtatcaactcctaaaacattgtatatctgcggtatataaaaaaggattttaaggtattaggtacttgatcatgcgtatttttgtctaagaaaaaaacacctaagtctctaggagaatgtgacagaccacacctgaaattatgggtcgaaaacacttcaagggcctcggcccaaatgaacagtgttctccgatatcctaattataaaaaatttggtttttggtatttcaaccattcgcccttctctggtaggcttggttcttgtattcgatcctacacatcactcgtcttgataatatggtattcctagactctaaccaaagacttatttaaatttggattattttttgtcttttttaattttcaagatcaccaatcgtcattaatttcttcatggaactaatacactttcaatctttcgtacaaacattaaacacaatagatacgttttgttttatcatcaattcgccaaaacccacgggggatctaaatgcactttcaacacgtttattagtagggtttcaataatgccttgttggtacttttgcaatacataaactcaaataattgtttgttcaaaagcatagtaacaacaataatagaatgcctaaggctgtgttcgaactataaggaaggttggggatcttctagttcgtgcacataaaaatggagtagcttattaaagcacgattaatttaagtattactatcttcgtcctaaaataagtacagccgtgggtatccgtgtccaacatttgaccgttcgtcttatttgaaaaatttataaaaaaattaaaaaaatagtcacacataaagtactattcatgttttatcatctaataataataaaaatactaatcataaaaaaatttcaaataagacaaacggttaaacgttggacgtgaacagtgtaaaacattacttattttgggacggagggagtagttgtaaaaaacttaaaaaataaatcaatataatttttaaccaactttttatatagatttttttttcaaaaagattcgggaagcatgcatgcaaaagagagagagaaagcagaagtcgggttttatctttgatttgactgtgcttgcattttatttttctctcttaggatggctaggccttctctccattctatcataactatcctcccaatctcgacattacatcatctaaaaggagcactattttttccttaaactataatctgtgttaaataacctagaaagcaactactatactctatattataagatgtaagcatttttataatttttcacggaaattaaagaaataggtgaaattgaacggtggaatgttgtaattactccctcagtcttaatatgtagcaacctcggataggtcctatccgagcttgctacgtattgaaaatgagagggtaggggtgtaggtaagaagaattaggaggagaaactaaatgagatatggttgtgcttgtttgggatgagaaaaatgtagagaaatagttatatcttgggataaattcaaaactaaaaaaggatatattttggaacgatggagtagtactttaggagggaaggagtagtgtatttagcaaactaactacccctggtaattggcaggtgtacgttcgtgttcatatagaatagagatgagtgtgtgagctttgtgagcgcatatatttgtagtgctgtgttttaacaaaatatccacatccttctacttcaatataaccaatctatagaggaccattttgtaattaccacaacacccagaagtctaaacagatagagtactggaggagtagtactactgcaaatccccaccccaaaaaaataaaaaaaaaatctgctcttaacaactccctataaagctaccactacgcccccctaccgcggagaagcaaccaatccaattccgaacaagcaaggcaccaaatccccccaccatggatcaccgcctcctcctcctcggcctcctcctcctctccccggcggtggccgccgcctcagtccccggcgaggaggagccgctgatccggcaggtggtcggcggcggcgacgacaacgagctggagctgaacgcggagcgccacttcgccagcttcgtccagaggttcgggaagtcctaccgtgacgccgacgagcacgcgtaccggctctccgtgttcaaggccaacctccgccgcgcgcgccgccaccagctgctcgacccctccgcggagcacggcgtcaccaagttctccgacctcaccccggccgagttccgccgggcctacctcggcctccgcacgtcgcgccgcgccttcctgcgggggctcggcgggtccgcccacgaggcgcccgtcctccccaccgacggcctccccgacgacttcgactggagagaccacggcgccgtcggccccgtcaagaaccaggttcccctctcgtctcccgtcgatttttcccccaaaccaaggactcctcctttgatttctcgattgaatcagccgtcttatcgtttcttgattttttttaatttttttgcttttgcagggatcgtgcgggtcgtgctggtcgttcagcgcgtcgggggcgctagagggagcgaactacctggcgacgggcaagatggacgtgctctccgagcagcagatggtcgattgcgaccatgaggtgagaggcgtttgcttcccctttcttgtttttgcgtactggtatattattatccttttattaggagcaagttttatttgtaattttgtgattggtctgtgcttctatgggtgttataagagaggttggatgggtgctataagagaggttggatttttctggctttccgccaatgttttgtcagctgctgcgctgtccttttcctatctattttcttggtttgtgattgggcagcgcacccaaatgagaaggggaaagggaaattggggcaaatgaatgggaaagggaaatttgggaaaggagttgcatgattccttggctaactttgaaagggaaattatgaggaaaaaagagtggcttgtggtattatcagtgcttaagaagtcaaaccaaagtggtgaacttagcaagcaaatttgtcgtggtcgattttatagtggtgaagtaggtgaataaaacaaaagatgatgaatgcaaggctgagtggataaaatctccaattgatactggcacatgtcgctctggaagatcggtctaggtaggcgtctctctgggtctaccgcaggtggataaaactaagatgagatctaggtaagcgtctctctgggagttcatggtgaccttgtgcattgataggtctatgaaataagagagttcatgcacccttgtgtgttggtacgtgcctatggtatggtaacgaacaagcgtatacaattgggcacaaagggttgtttgagtgggcacttaatgaactgaaaagtgctgaacttgggaaccctatgattagttaaattttagagaaagggagttaagaaagtacccgatgttctggggttgtcatgtattccagcaattttagtttttaggtactagtgaagctaccatgaagaagttgtaaattactcaaatctcaaccattaagttcacttgagtgaaaaatataaatggagtcgatatcggccgcaggttgtttctgtcattgcttcatttcttattttactgtctcacttgatggatagacagccaaacgtttgtgtgcactggcttgatgtactctttcgttttggtaactgggccccaggtgagaccccatcttggtgatattgttgtacaactgaataactactgtaccttttatatcattatatcggttaagaaaaaaataatcaaatttcctcttttcttttggatgtgtcatcatattttaggggcaaatttccggtttcctctttcatttggttgtgtccatcatattttaggggcttgctcttgacctatttctttccatatttacttcttgaagcttcactcctaaatcctaattaatgaaaaagttagtgcttctctgttctgttcaaaaataaaacaaatcttatttccataataacacaattcactaaaccatccttacaaagtctgcaccaccgttttaatttccgcctatagcatgggtgattctcttcctagttgaaaattctatgtaggattttttggtagtaagatgtaagtggctctcattctagaaggcttttcattactaagcttctacattaggaaatgcgagaaatatttgttcagaaaaaacaattttctcatatatttaaaagataatcaacagtgattcctatggtaattttacaaagtagcaccaggctaatgtcttgcacaacctctacaatttgtcgtaaccagcttaagtgattttcacattgctttcatcgcaaagtacacatgtaaagcttacccgagtcgtgctcaaataatttttagccttcctggtattataatactttttttgacttgacagtgggatatgtactgttgttatttgttttctactgttacctgtttcaactgaatggggtatctcaacttactgggcttcattgttatctaattttgcagtgtgattcatcagaacctgattcatgtgatgctggatgcaatggtggattgatgactaacgccttcagctatcttttgaaatccggtggccttgagagtgagaaggattacccctacactgggagggatggcacctgcaaatttgacaagtcgaagattgttacttcagttcagaacttcagtgttgtctctgtcgatgaggatcagattgctgccaaccttgtcaaacatgggccacttgcaagtaagtactataaccatctctcggaatgatgcatttgcaggtctgactgttatatgtaaatacatgaatatattgtgcaattgctgatgaatgacttcacattttcctgcagttggcatcaatgctgcgtacatgcaaacatacattggtggtgtttcgtgcccgtacatctgtggcaggcaccttgatcacggtgttcttctcgttggctacggcgcatctggttttgctccaatccgcctaaaggataaggcctactggatcatcaagaactcctggggcgagaactggggagagcatgggtactacaagatctgcaggggctccaacgtccgcaacaaatgtggcgtggattctatggtctccaccgtgtctgccatccacacctcaaaggagtagattctgatcagtagtcccccgaccatcctgtggatggttcacagttggtgattctgatattatatataagctagaactacgaaatatacttagtttatgctccatctgcgctgttattgcagttatgataagcagcgatgatgtgaagctgcaactgaatgtttgtcctaagttatatgcttggtttgctacgcaatgctacacgctatttggaggtagctttaagtattatcgccattcacgaacttgtatttttactattaccaatcttttgaatggtctgtattatatgcatgtggtctgtttacatggaataactctgtctattgctacgaatttgcgtcttgcacattctccattttaagggactctggtattgatatttcagtatttgaatctgtacaagctgcaagatggttgggttattaccatacgagttataactacttatgcttaacaaattatggacgatagcaaaatcttggtataatccctcgagtggaactttctctctttaaatttaatgtaaatggttgtaaaaaatatttagcaatatagcgtatagtaacatctaccactgtaccaaaagtcattcaaaatgaatgttgttaatttttttagaacttttagcaactatttagatagcgtttgaataaatgaggggatatctcctcgagagtttaaaatactttctcattgtccgtggcattctcatgttagtaagactacaatctctacttatatgatcatatcaacacattttattcatattatggaaattgcaagatttgccattcatccattgggtaggggaggcgggaagagaggggaggaagagagatgacaaggactctgtggctatggtagcgatggtacaaagttgtttctcttccctagcaagaaggggcatgtagcttagtggttgtagtagccttagtagcatcccaggtcctgagttcaaagctctattagtggcgaatctaagaagaaaatagagggggtgttttattcgaatgagagtttcaggcgagtagtcgtctagcttatcacgtcagtggcgaatccaagaagaaaatagagggggtgctttgttcgaatgagagtttcgggcgagtagtcgtctagcttatcagacaagctattgacgtatgattacttaagcgctgactattataaactttaaaatttgatttatttgaattttgatgaaatttctttataagatcttttttcaaaattaagaaagtctagtggtttgacaagcacgcccacaaaaagtaccttaaaaaaactctaaatcccaaacaacagggcctaaagctagtaaactatactaccccatccaaaaaagactatcctaacaacgaatctggacacacatgtatccagattcgtacttaaaattggtttttttatgggacggagggatacacgccaatctattgtcaatcaaatttctgatttgtacgagaaagaactcaaaataaagaataaaaatatactaggtatgatagctatagttggctgtaaatatatatatgaaaaacggttcgatgttcttttttcattttttttatttggttgcacttataataaaggaaccagttagataaatatatatgaccaaaggcaggtagtactgcttccctagctagccagctactagtttgtttcttgctgtgatgacttcactagagcacgtactggatgtatgtggatagatacttgttacatatgggctatggccggccggagctggggctggagccctaaccagccccaacgatgaatccgccgctgagccccgtgggagcgaattttaggctaggtaaaaaaggtcactcgctagggaccaactagtgatgatgagcattattggtgacgacttgacagattagggtttagggttgggttgagggtggtaggaggggttaaggggaggtggccagccaacaataggctgtggatagtggacaagggtgcgtgacaaggtggcgatgaaggtagagtttgtgtgatttggtaggacaggtctcatcagcaacaacaaagcaggaggggggggggggggcgacccatgtggaatcggttagggaaagagcgagaagggaggttgaaggcatccagtaggatcagggacaaccctaggctccgagcaccctgggccatgatccagggcctaggattaagaggcaatgggccaagataaattttcaccacattgggccaaccttgtgaaaatccagtataggtcataccgaagggggggggggattaagggtaatgttgtcgacacacgaaggatgagggagtgcatgtatcgtggagaaggatacaaggggaagataaggcttctatttaagcataacgaatcttggcgtgagctagaccattcaaaatgactaaactttgcaggtaattgaggtgaccgaggaagatggaatatgttgttgggtgcaatgtactagctgtagaaagggtgaaagagctgcccctagtggattttggtttattgatgacaaacgattaagggactaatgcacttattgagtgtataagcaagtgattagtccgatgaagaagctaggaaatggacttatcgatggatgagaattaaagagaagatattgaagatgcgggtatgaagtgactacctatggcaagatggtgaagcgcaagcgacgctcagctgcgatggaccatgcagtggtgaagggcaagcaaggggcttggcgccgatgaaccgaaaccggtggtgaagggcgagtgaagactgtgtcgtgatgaaccgtgcgaggccatttgaagccatagattatccacatcaatcatttgagaaatagaagatgaaatgccaaagatcaagaagatgagatcttcccgatgatcaaatgaccttgacgttggtaaccctccaagtgaagaaacaatatggtgtgaaggtactcctattggtataactttgctttttaaatttgagtttaggatgccgtactattaagagggatactacatgcatataattggttgaatactagtgctcaaaatgcttcatctttgtgtgagttgaaaaacctaagccaaaatttcaatcccgagttgtttcacttgtcacaacacttacatcgggtttctttgcaagtttttcataatctcttgaaggttttggaccatgttttatgttgggtttgatagcccacgaaactagctttccataaagtccaagatcttcgaaatcggagttcagagtaaaaagttattgcatttttacttgagcaacatcagactatccgatttgaaatcggactatccgatgtatcggactatccgatttttcacagaacttcactctctgcctttgtttgaaaaatcctttcgagtgagtttttctaagtgtcggagtatccgatgttggatcagatagtccaatgatacagagactccgaaatttcatggaacttgagtctctgttggaggatgaagtttttgcttctaaaatatcggatactccgatttaacattagattgtccgatgtctcggaaagtccgaaatttcatggaacttcattctctgtttcttgttgccttggaggtttaaaatatcggactatccgatcttgtatcggactatccaacgtgggctgaaagattcccctccaacggtcacattttggggggatctatataaatcccccaccaacccttttctagggttgcctaaactgatttcattccaatcttgctttgggttgagctttgtgctaagtgctttggatctttgagctctctccctctctatctcaaatcccccttgttctttgtgacttggatctttgtgtgtggatttggactttgggagcctagtgtgtgtttcttttgatcttgagcactaggatttgtccaagagttgtgtggtgtttattactcttggaggttgaggactcctagacggctaggtgtcgttcttgggccaccgatctacgtggggttggccaagagaagtttgtgaaggtcggatctcgcctccgcaaggaaagagatacccttagtggaaggaggagtgcatttgtgcaacctcacgaggatagggttgaaaaagacccggctctttgcgagcccctcaacgaagactagaatcccctcaaggatttgaactccgggaaatacatcggcgcataaatctcggtgatatcctcactctctttaccttcttgttccattgctttgtgctatgctaatattatttttggtcgagctcacctctttgcttgtggattgaatctagatctcttaggttgttctcttatttgtattgttgttgtgcagttcagatagtctgatctcagttcagactatctgatcacataggactatccgacctgatatcggacaatccgaccctgttttgttttagcttccgcctttatttttaaaaccgcctattcaccccccctctaggcgacatcaaggtcctttcaaaggggttggagcatccgccgctaatgcgtggcggcagacatcgaggtggcagtgatactgctgttgtggcggcgccactgccccgcccttgttggctagtcttactgcgtcttagatccactgcttcctcttccttccactcacccctactagagcaggccaccgaatttgcccgcgtgagcaagaccttaacgagcaccaaggaggcggaagatgagggagttgagccacctttgatttttcccatatccgtgtcgagtacgccgtggatggggacactgttgagctcggtgcctcggtgggtgcccttcctctcttcctcatctcaccgcggtttgagcttcttcccctcgatgcttgagttctcccccctcatcgcctcagcctcccggctccttcctcttcgccccgccttgccgctcccgactttcccttccttccccgttggcgtcggtgtgttcactggaggagaggagatcgacatctgcaccatcacactactgagtactgacttgctaatggcggcttcattggtagagaggagaacgggttcgtggagaaccgtaggcgtggatgcatggaggctcacaacaatgtctcggattctgccgtggcgtcatccaccgccacctgcctcctttgcattaccgctcgctgacatcttgccctcgctctattgccctttggtaggagatacggagaaaaaaagggaaagagagagagagagagagaggaggaggaggaggaggaggaggaggaggagggaagtagagagaggatgacacgtgggtcctactaatttttttgggttaatgggatctatgccattgcaaatttgcctattcagaaaaataccattataattcgtctattcatagttgtgccattgaaattttagaaaatttgaaccgtgacactgctgtcatgttttccatccaactccttcctttttccatcttcttccttccatagggaggggcaaaggccggagcatgcgccatcattgtagaagagctcaacgctggtggctgcggcgagggagtcgccgttgccggcggcaatggcagcgggggagcagtgcaagacaatgacagagttgaacggcaagcggtcgccggccaccgccaccgtcacgacaacccggcatgtgggtctcaggtcgttggtgatggcaggccgagtgcggcggggttacgtgccagccagtccttgagaaggccaccgccgtcgttggcagcggcgaggagggatgaggtttcttctccttattgctgggtggcagggccaacagtagtgcgtcgttggcgtgtaggggcgatgggggaggaccatcctgcagcggcgtatgtccccccaccaggcacgacgtaggcaagccaagccggcaggctggactgatgatacctcgccaagtcgccatgtgggtcccacatgttgacttagcgagttaacaacggtcaactaccatattagtaaaccactttccaaaccaccaaagatttgcactggttttcgaagattgggaaagcattagggcatgtacaatggtgtctaataacgggctctcttcgttgtcatgcaggtaaatttggtgacgtggaagaaagagagggaaggaaggagaaacatcattgttatgcatgacagcggctcagagtcaactcttagcgtttattaacggaaagtttgttgcatgagggtggagaaaaggaaagaagtataataaaaaaatatttagtgtattaatggtttagaaatcttattgtctctactattgtagaaggatagtctctaatgtcattaattaatatagagagctcatattagactctacctttgtatatgcccttatacccggttttgtggtcgagggagaaaattcagtaaggagcaagagttgagggttgcaaataaacttattccatatatggtaggtgttctgggccttaagcgattatgcccaacccatgtgaggcccagtcctccaggcaccttgacacaggctattattttctgcgaatattagcaagtagcaaccatacgatcgtcaattccactactagaaaactcattttcggcgtcgtaggggatcgattttcacaagcgggcatgtaattcggtgccaaaacccggccggaaaaaaagtacccggggtggagggggcagtccgcctgcaaagatcaatcctcgcaggcgccgcttatatggcccgcctgaaaagatgcccctatatagtcttcttcctccccgagccctgttcattctccccgaagtttctctctcctaaagtgacttaaatataggggggggggaggttttgaacttcaaatctttgagggatttttctacggtgcttagatctactcatttccacactaggtatgcaattttttaagcttttagaccttaatttgtgatggatttatgcatgcaaaattgtgaaggaagagctccatgttttttaattttatttcttttgatatgttgatgttagatgtatgtgtaatacttgatgcctcttgttgtagtggtttaatgtggtaacataaattctcaattttttttatttttgctatcacatccacctcctacttctagatctagatctagatcttgtcatatatatagagagaataaaatttttaatgtctatttattcggtgcaataaaaaaaagttatagtattttgtaatatgccgatgatatgattttgttagattttcctaatgtactaatttggcatgtctgtgtaaaaaaaattgaaataaactttgattttttattaatttacacttaacttttagttaattagttttgaatagcgataagttttttcaataaaccctacaaatttggtattaattgtgcaaatattttatgtgtattttttttagagatatggaaagtcgggaatggatgtatcattggccgaggtttttgtctccatatagaaacgaagtgtctaaatttattggtattgccaaggcacacgctgagaagaacaatatgaggaagataatttgtccatgtgctgactgtaagaatgaaatagcctgggacttcgacgatgcttttaaagtgaaggagcacttagtaactcgtagatttatggacaagtatgaaatatggacacgtcatggcgaagaacaagtggacgggcctgaaattaatgtagttccgacacaagttgaagacatggtgcatgacaatggttctgttgaggacaaaatcgacctagaggaaatgttatgtcatgcagaacccgaggtgctgatggggtcggctagagggttaaataactttgaagctttacagaaggcagcaaaggaagttttgtacgatgagtcgaagggctgtgacagtgagttcacaacactctggtcagttcttgaacttatgaggttaaaggcgagacatggatggtctgataccagtttcgacagtttgttagaacttctgcagaaaatgctcccgaggcctaactcactaccatccagcacatatcaagcaaagaaactcatatgccctctttcacttggtgtggaaaagattcatgcgtgtgtaaatcactgcatactgtacaggaaagagtacgcttctttagatgaatgtccaacatgcggtgctagccggtacaaatcgaatagcaatactggcctagaaccgtctgacacaactgagggacgacagagaaaaatcccacagcttgtgatgtggtaccttcctgtcaaagaccgcattaaacggatatactcaaacccgcgagatgcggaactagtgtgctggcatgaagaagggcgcaagaaggatgggatgattcgacacccggcagatgctcgtcagtggataaactttgatgctcagtacagagagtttgctaaagacccatggaacattagatttgccctgagtactgatagagttaatccttttggagacatgagcagctcacatagtacttggccagtgcttctcaccatgtataatcttcctacctggctttgtcaaaagcgaaaatacgtactactctgtatcctcatacagggaccccgttagcctggtattgatattgacgtatttcttgaaccattgttggaagatatggctgatttatggaaagagtgattgaaagtgtgggacgagtacttaagggaatacttcacagtgaaggccatcatcttcgtgaccattaacgattatccagcaatgtttttagtttcaggtcaaattaaaggtaaaacaggatgtgtgatctgcttgaatggaacgtactatatgtatctcccgggttccaacaagcttgtgtacatgcggcaccagcggttcctatgcacaaatcacaagtaccgcaagatgaaggcggagttcgatggcactgaagagacagatcctgcacccaaaccaacctcgggagaaaaggtgtgtgcaatgacagagaaaattgtttgcgagtttggaaaagtgactaagaaaccatcgaaggggacaaagcgcaagaaactcgagaagaatacgaaacaaggggatagtaaaaagcaagatgatagttcgaagccagatgataaactccctcccccattcaagaagcattccatattttttaagtacctcccgtactggaaagatctggaggttcgacatgccatagacgtcatgcatctagagaagaatgtgtttgacaacatagttggaacattgttggacatgccgaacaagactaaagatggtttgcaattaaggatggacctagtcgagatgggaatcagggaagagttacaccctcaagaaggagaaaaaaaatggcaaagtatatcttccaccagcctgtttcacactgacacctgaggagaagaagtcattttgcaactcactccatgatgtcaaagtgcccataggtttctcatcaaacatcagtcgactagtttcaatgaaagatttgtcggtatctggttataattcacacgattgtcatgtcttgctcaccgtgtttcttgcaattgcaataagggccataaaaccggagcatttaaaggttgctatcacaaggttgtgctactttttcaacgcagtgtcacagaaggtcattagtctcgaagagttaggaaatctccgtacattcgcacaggagacacagtgccaacttgagatgtgtttccctccgtcattttttgatatgatagagcacctcattgttcacatagtgccgcagatggttgcgcttggcccattgtacctccatcaaatgtggtcatacgagcgttacatggcggttttgaagggttacgtctgaaatcgtgcacatccagagggatcaatggttgagggttatagtactgaagaggttgtcgagtgctgtatcgattacctcaaagatggatatgcaattggagtacctgtgccccgacacgagggcagattgagtggcaggggaacgataggaaagaagagattcgtcacccatgatcacaaatcattccaagaagctcacttcagcgtgcttcatcagtttgctatcgttgagccgtacatcgatcaacatatcgaactaatacaccaccgagtggataatgaaagaacacaagcgtctcttcgtagattggttgcgagacctagacttacctgagggacaaactaccgataaaataactatgaagcggttggcttgtggtccatcaactacagtaaattcttggcagggatatgacattaatggatactcgtttagtacaagagcccgagataataagacctatacgcaaaacagcggtgtccgtgtggaggcaattgatgaagccggggaaaaacaatcatacttcgggtttattgaagaaatatgggaaatcgactatgggcacacaatgcaattccccatatttaagtgctagtgggtaaaatacccgaacgggatcaatgttgataagttcggtcttaatgttgttgacctggcgagtgtgggtcacaaggatgacccttgggtactcgcaatcgcgtggcacaagtgttttacgtgaaagacccatcaaatttgaagaaagatatagtgctacccgggaaacaaaagatattgggagtggatggggttgaagatgtcgaagattacaatcaatacgatagtataccactttatagtcagtttgtacagaagattaagaatgtcgagacatctactcagaagatcgtgaagcctcacatgcacacggacggtgtgggaaaaaatgttaaagggtaatgattgttgagtcgcatttaagcatctaagaagttagtagttatataattaaatttttagaattgatagtgtgctcaaaattttttaattaattacacattagtaatacactaaatattaaatttgagtggggtcctaggaccccactccacatactgtggatccgcccctgcaacccgacatgtgggtcgcaggtcgttggcaatggcgggccgagtgcggcggggttaagtgccagccagtccttgagaaggccaccgtagttgttggcagcggcgaggagggatgaggtttcttctccccgttgctgggtggtagggccaacagcagtgcgtcgtcggcgtgtaggggcgatgggggaggaccatcctacagcggcgtatgtccccccgctaggcacgacgcaggcaagccaagccggcaggctggactgatgatacctcgccagtcaccatgtgggtcccacatgttgacttagtgagtcaacaacggtcaactaccatattagtagaaaccattttccaaaccaccgaagatttgcactggttttcgaagattggaaaagcattatacccggttttgtggttgagggagaaaattcagtaaggagcaagaattgagggttgcaaataaacttactccatatatggtaggtgttctgggccttaagcgattatgcccaacccatgcgaggccaggcaccttgacacatgctattattttctgcgaatattagcaagtagcaaccattcggtcgtcaattcgtcattcctgcagttttctgaatcaactcctcattcgttttgtctaaagaaaacaaaaaagaaaggtaccaatagttggcctacctcgaatcaccaagagccacaagtgtcaatttacctgaaatgatggtgaaccaagcaatcgttgaaaattgcaatacatagatatagagcagccaaaaaacttggcctttcgttttcacatcttaaattttcttgcacataagtggcactttgccaaccatatatatataatatcacataactttatcaaccatatatacggtatcacatggttccgttttctttgtataaatgtgcatgcgaggatcatatgtgcgtgtatggcgaccttcccaccatattcatcaataactttgccttgcctttcctgatttcaattcaacgccacgcaaatcaccttcatttctactcatctggttatcaaatacatgtcgaattggtacgtgagcttttcaaatttcacttctacttggttacattaaaaaaacattagagtatttttgttatgaaaattcctttatactatgatttgttatacaaataaatgtacaatggagacacgaattttaagcggaaaaccctttgcgggaaaaaaccacaaacgccgaccattaatgatcactattgaggagttggatacaaacgcaaggaatacattgggttgtcgcaccctcgccgtgcggatctaggagttctagtgggcaagacttaagactcacgctaggaaactaatcctaatagtcaagttctatttgaaaacttatctgaatatattacatgcctaaaattcggatcacatatttaacatgattaattatatttttacactatatactaacgacgatgcctcttaaactaatctacataaaatgcagatccatgtccgttccatgcgtgctggtgcgatatgggggccaaatcagctgtaatactaacagttcttctagcccatatattagtgatcttaaatgtctctcagtattacagagaatttatatcctatcacacgacatcaataaaccacactataaatcttgcaaatcacccctttgaacttcatggtaaaaagaaattcaaatctaaatggatagccacatataaaaccaattaaggtgaatatttcctatataaaaagatggtaacacatttaatagaaaatatatatttttatttattttaaataatattattttttattcgtagtaactagtaaagaatggagattgagctagttttctataaaattattgttgcctatggttgtgtacagggatgaaactggtacggatacttttggtacgtccgaacgttttttcgaaatcggataggtttgttcggatagtttcggatatttttggattcagaaacaaattcggattttttttctccgtaacataaacgaatacagtaagggaaatatccgtcggaattgcaaaacggttatccgtgaatatttttcgaatatccacaaacaaggatcaaatttcagaacaaacatgtacatatacataacttttccatacgaagtcagatgaagacaaactttatatcaaaattgtagagctcaacgagatatacaactttattgttaactattttattatctgagatcatttaagggtctaaatattcattataaaatatcatatctatttttacaaaatctcatatctgtaattcaaacgatatcctatagagacgtgttccatatcaaagttgtagagctcaatggaatctaccactttgtagtttataacatttgtatttgaaaatatttaaactataaaacaaacattacaagtttcgaagatgtgaaataaaataaatagcatcttcaatttataaaacaagaccttgataagtgatatggtaagtaagctatacatgaagtaaaaggtatttggactggaaagtgaataaccatattacatgttggtctttttggggaacggttatgaaaatcgattttcacatacggttatgagaccgcctacaaaattaacgatagacatttaaatatgttgacctaaaataacaagcgatatctcttcattgattaaggaagctcaatttgaggagtttttatatcccggcaaatattcgttaccgtatttgtttcgtttcgtatcgctccgtatttgtatttgataatattcaatttaatttccatatccgggtttttgattccgattacgattccggaaataaaaaaatatgaaaatgaatatattaaagctagtttccgatccgttttcatccctagttgtgtacatttaccatgtgcttgtgtttggtgcttccttcatttaaaaatcagtgaaaccctcacacaaacaaacaaaaatgcattgatagatgattttgtgtcaatgctacaaaatatgctccatggtcctatgattaattccactatatttaaatcagggtgatgtcgttatacatgattccctgcatgttctaattcaaggtgagtactaaatgtggtgcattcacacattttaaggagtaattaattgttacattgttgggaggagcagtagttgagagtataataggaaaaaattgaatgaaaggtgataaatggtactccctctgtactcgtaaaggaaggaagtcgttttggacagcgacacaatctccaaaacacaactttgacttcttgtttctataaaaacatttattgaaaactgatatatgtatacttttatgaaagcatttttcaagacaaatctatttatataatttttatattttcaaactcaacaacttgagagttattcatgatttatattcccaaggcttaacttaaacattgtcctaaacgactttctttacaagtaaggagggagtacaagtagtatattagagtgacaagtattttgggacaaatttcaaattctagaaagataactattttaagacggagatagtactctatacttttattttttttaaataaaaactccaatgaaggtgacagtctgccaccccatctacttatattgtagttttacatattatctattgaaattcttaatattacataacacttaaatttaaatggatatatagttacaaataaaattaaactaaagtaactatttattcatttcagttaatatcatggttttttttcttttagctgtagcaattaactgagtaatatgtaacagctatatccatgccaaatgcaaaacggtgacattttgtacataaaaaagacccattagaaaaggaaccgccatccctcatttctggggaataattaattatttgtcacttttacgagtagtgataaaggatttgccactaaacctatatgttacagatagatgagattctacatatcatagataatgagtggtaaataattaattgccacatattaaaagtggcaaaaagttaaattttcctttttcttgaggttcacatctgagccgtccatctgtcaccccagctaagcgaacacaaccttgttttgttgtgttgtgcaactcagttcaaaacaatccaaaaaagctttattggaggtgtttgggggaagagaccactataatgccacgtcactaaatcccatccaacatcaacggcatttgtgtaagtacgtttagcaaattaagatcatctcatctctatccatgtattcattaacactgatgctacatctcaactcctttgatatccctattgttagataaccaattaatcaattttaatgcaataacaaaaccttccgactaacgtttcgcgtatggataataacgatgacaatattatatccaacgtcaacaccagactatatcaatgacttactattatattaataaacacaccatcgtacaccatattttactggctatcatttaccactgcggctaccggtcaccctaaatatatattcgtatgccatatgctagtctctctcggttatttattatttcggagagagttggtaccaatttttatgtagagatctatttatttttccgagagagtttgacaccccccaatttctctctggagatagataatcccacccttctatatccatctatatctatctattactatctatatcttctttatatttgacggtaacacatatggctgtgcgtggctccaccattggaaagaataaatacagcaagctaaccttgggggtttataattataacgcttccttggcccccttcgtctccatcttcttttttttttttctctctcccttctctctctctacaaatctggggctcccagtatagcttaggttgatttaattatggttaacctctcacagtaatccgggtgagaggtgggaagccaaagtgggagaagcaaaaatattctcagggcaggtaaggtaagcgaaggcgagaagagaagagacgagaagagaagagagagaaggtaaactagtctctcttgtacatggtggcttcccttcccttcccttctcttcccatctctctctcctctggttttctcctaccttttcttttgggggaaaaaataatattaattaaggcgcgcgtgcgcggcggcgcggcggcggcggcggcggcggtggaggaggattcagggtggtggtggtggtgatgatgggtttcttctcgtcgtggggtgtgcgcaggggggatgagcgcggcggcggaggaggcggctgcggcggcggcggcggaggaggtggagggggtggaggcggggaagaagggcgtggcggatgcgaaggggaaggggaaggagaaggtggtggtggcggaggaggattctgcggtggcggcgggctccgggggaagcggaggcgggaggaggacgttggtggcgtacccggcgcgggttgcggggtacaaggacgtggtggcggacgcggcggtcttcaggagggcgctcgaggggttgcacgcccagatggggacaaagctcaagtaagggatcccctctctctctctctctcacacacacacacacacacacgcaccaatctgtatctggcatcgccgatccttgcaccatgcagctgccttacgatatagcatttgatgccgttgcgcgcttagaacagttgctgtttgttttgtttctttcaatgcgcaagaattgcaacttgggagataaagtttggggagaaagagaagttttggggagagatagcgaacctaataataatggacgatgcaaatacaggcatttatatatttatatttatttatttggaatccggatacgtccggttttgactaatcaaccccatataaatgttaccctcgaaattatgtggcctatatctgccattgagtcaccgaatttatggatcgaccacatttctggtttcttatctttttgttttccccttcgtttgtgcaaattttgtccacagattgtgatagttggcttgggcctttgttgctgttgctttgcgtagttatccttgttttatgcctcgttcaatggtcaattacttatatgttgttaatgctgaggagcagccctagttgatgatgttatgttcaacacttatgttattgctcatttgtagtttgtagttgccttagaccctagtctaattgagtgtgtgagcctgtcccttgcaaatcaatgtacttgctatagctgtattatatggagagaatgacaggtatgtttgtcaatgttgcttgaatcactactgttaatattatatataagtttaagttgatgaatgatttgcattgcaacatgtttgtgtactgtggtaattagttgatctactctaccaagttatcattgagcatgcttcattttggtgcatttctaacatcatttttgttttcagggtgccaattattggtggaaaagaccttgatcttcatcagctgtttaaggaggtcacttcacgaggtggcattgataaggtgggaattcaataaaatcattcatatttcaattgtcaaatgttccttaagaaagtcttttagccagcgacagtcatgtaagactggccatatatagtaaagcaaatttttattatgcttagaagtttgccaaagaaaagcaaactaaaggcatggcacttgaaatttttgttgttttcatgatcttattattagttgttacctgtcagaatagcaggcaaataactgaaatttatttcacaggtgaagtccgataatagatggagggaagtaacagcatcatttattttccctgctactgcgacaaatgcttcttttatgttgaagaaatactacatgtcactattataccattttgagaggctatacttgtttgaggcacaaggctggtatcaagaaactggtcagtgggatttatagaaattcagtcttctagtttgtctgttgctgtattactagctcataccattttgtttcagcagattccagaagcatttcctgtatagaaatgaaagctgaaggtcaagcttcccggaaaaggaaaagaggaagcaattcttgttcttcaggtcagtttcagttcacttatcttctgtagcagtttgttttgtttaggacttcttctgtggcaggctagcagctcattacaagagaaggaaagattgtaaatgttactcaaaagtttaagtaatagtatgattgtgttaagtgttgtaactgtcaacttacaagatgtcgtaacatttcttcagtcgaagcttgtgagtttgcagcattttgtacattttggcccttgtattcttattctacaaatagaccctccaattaacttagagtggaccctttgttcaacaccattgatgaaggtgccgaggtacaacatcttggcgccaaccatacacttcggttctgagaaaggccaagctggcatgaagtccacatggtccgcgcagaaggtgttggcgctaatgtaatatccaggatgacaagctaacagttttaattaaacaatcgtagaaaaattgtgtggtgataagatgtcccccgtgccatgtcggcgagccgagtttgatccttggctggtctaacttgttttattttcttttttagtggccaaaaggtaccatatatattttttaaaagcaaacattcctcgagtcatgtatgcacgcatacagctgaccattaaaataagagaaataaaagggaaaaactcacagcttgaacactcgaacccaggatgtcgaggaaatcatgaggccatcaaaccactagaccacttatcagcttgttacctattgtaccccacaagccttttaagcttcctatatggtcagcgccaagaggtttgctactggccaactgctcacgtgtacttcatgccagcgtagcaaagttctcagcggcaacagttttttattattttcttttttttagtgaccaacaagcactcctcgattcatgtctgtatatgtagagctgaccattaaaaagagaaaaagagagggggggagggggggttaaggttgaacactcgaacccaggacgttgaggaaagcatgaggccgccaaaccactacaccacttatcagcttgttgcctattatatcccacatttaagcttcatatgtgatcagcgccaagagctttggtgatgaccacctgctcacgtgttcttcgtgcagctcgccaaagttctcagcgccaatgtgtatggcgcttagatattgtaccttggcaccttcatgatggtgttgagcaaagggtccattctcgaaataagtttattggagggtctatttgcatgtatatcaatatataagcccatttataaattcagtaaaaagcgagcatgttctataatggtgctaagataaatggagaacatttataggaagcattattgctgttctcaagcatattctatacggtgttaaactaaatggaaaacatttttatggaaattataattggtgttctttttatacatttaggtaaagttgtttaaatttatatgactaacagttagttcctttgactttgtcagacctagctgcttctttggataatgatgtacaagtgataattgatggtaagtttgaacatggctacatagttaccgttatcatgggctcaaaatcaacgaaagcggtactctataattgcaccgaagaacctgcagtgccaactgcggtgcctcatgttgcaattgacagcgctgagggcatacgtcctcgccgccgccgccgtaggaagaagttaagtacaacagaccccaaccatcctaaaccaaacaggagcggctacaatttcttcttccaagatcagcacaggaagctcaagccagaatatcctggacaagacaggcttatcagcaagatgattggtgaacgatggaacaatttaggccctgaagataaagcagtaagagtagacacggtcttttgaatttcattacttcaaattgataaagtaatcatgcaatatatgtgctttgtaacacttatacatattgtaggtatatcaagaaaaaggtgtagaggacaaggcaaggtaccagagacagttagctctttacagagaacagagaacaggccagccaatcagcaacgcggtgcctatccagcagagacttcctcagaaagaagtgacgattgatgaggtggactctaaagtcagtgaaggtgatatcctgctgtccaaccaaggatacagcagcagtaccagtagcagtgatgaaaccgctgattcgggagaaaaaaatgtggaagatgatgaagagtttaacacagagacatctcctgagccgagcatggaaacaacagattctcatggacagcctgatccttctgctgatggggagcgctttgaactgcgccgcagggagaaccctaagattgatgagaaacgtgacatgccacctaattaacgcttgtgccgagttgaagggaaaatttctgaaggatttttgttgtaggatcagattgctgttttgtttcactttacctttgcatcgtctctagagactgatgcgctatgctagcgcattgaatatcttctttttttatactgttagcaatttgaattgctctttcttaggtgaagtgatcacgggtcacttccgggcatccttgatgtccgataaattagagaaatgatattattttattattcactgtcgtcataggagtactgagtacaccagtttgttgctcacattagaacccattacaactgtaaagactggagtaatatttttaatagttggtagaattggttatatggcatcgaaagttggttatacatgtgaatgacaattctttgatggcggttttgatgacagccactgtcatcccatgataatgacacgtgtgacctattaagtcgatgatatgcgcctaggatggcaatgtctggtctaaagagtggtaaatcatcaaatcccaaagttagttatatgtaattgaacatgagagctatttaaccaagttgagaaacctattactgctgtccaacctaatactaatttatgatgtagtctcattggtatcggttagttgatagttgattataaatcgtaatgcttattagcgtgtaaaaactaatttgtaaataaatttttatatatgttcttaaggtacttaaattccaatgttgaaaaataaatcatgatgaaaaaaccattaatactaactctaaaattaagttttaaaatttaaaatttagttacggttgataagctaaagagcaaacaaaattaaagcggtacagcccgagacataagcaagcaaaacccactcctgcctgtcgaattccttttagacttgatcatatttcttggctgtataaacttacattaggttgcatatggctaaaaattaagtagacattattctgtgtatatatgatttctagaagccagctgttacaaaattaagtttatttaccagggttcgagtttcttgatgtggatcgggggaatttgaaggccacatcaggattaaccgaacaggctcttattgtttctcattaactgatgaggtcgttggcacaccttgatcttactaccggctggttaatgaactgctaccaagtgaaagttgagattgatactgagtgctccattgtcatacccatgaccatgacaagttcatacacaaaaaatctgcacaataaagtagaaacaagtaaaaacaaatccagaattatgcgtcgtagcttaataaacattgactgctggatattatgagaagataaaaaggaatgtgcatttgatttattgatacttcagcaaagagttagagcaaagcgcgcgcacacaccagagcacagcgtacaggtggcactggcaacataattctagatagcattaaaaatgtaaatgaactgggagtgagcaagtattggagaaacacctcttttttcagatatttaggtgtattggctcaaaaggtcccatgtttcttaccaagggaaataacaatactacatattttccgttcctgcatgcaatagtcaatactcaatagacacagttacaccatttatctttatctaacaaaggcgttaattataacagcaaaaccgagtcattatttattggaataaactgtgtcccgtactcaaatacttagagcaaaagagtgagccaaaatgctacacgttatattctgagttgaatcaatgctaaaaaactaagataagcaagaaaaagcggtgattgttctgcaacagtatcggacaacatatacctctggatttttctccaaacttgtaatgagaagttgataacattcattgaagacttgaacatttgaagttctgacagattgacaaaacctaagatcttgcatgttgcactcatattaaggtattcttgtcaagcaacaaaccaaggaactgcaagtctgcaacagcaacaccacggttcccaaatttagcacatggcatttagtaagatagagcacaaatgctatatatatgaaaacaacattcgatcaattcaaatgtgtaatgaaaagcagaagtcaaaacttacatggcatgtgtctcagcccaaaatgggctaaaatatgcttggtctttgtcctacggctgaactatgcactgtaccaagacaatatatggcgtggtactagaaatattagccaaataatttaacaacaaagtactgaaatggaactgtttttcccgaaattagaatattccttgaatgatatacaaaatgctggacaagatctttgctttcatactgctctctaggaatcctgagaagaacaaaaatttaacttgttttgaccaaaacaattcctcaacatgattcctccgaaaatcatttgcagtcattatcatccttcaggaaaccgttttcaatcacccctttcatcccttatcaaaattataagctctcaaattcctcttgcttatttttaaacaaagccttcaatgcggcgtaatagcagaatctgtcagtactgtacagctgtgctgcttcagacttcaggaaatagtccacaaccataggaaaatgtcattggtgagaccagtgtaccactccacgtggaagaagtgttacatacattttacagtcaaccagccctgttaggcataagtaaatgattagcatacttgaatgttacttcatttggagtgcacttattcctaagcatctcagctacaagctcctctgcatcctgccaccgctcagctctacacaaacccttcaatgtagagttataagaaatagcatcaggcttacatgacatggtgctcaataacttgagggcatcgtccaaacggccttgttcagaaaagccattgataagggcgttatatgtaaaaatatcaggtgtacttccatagtttggcatttgctcaagaacctcaattgcacgatcaaccagccctttttggcacaaggaattgattaatatattgaacgttacttcatttgggggacaatcctttccaaccatctcagctataagctccccagcatcttcccatcgtgcagctctgcacaaacccttcaacacagcattgtagctaaagatatcaggcttgcacggcatgcttctaaataactgaatggcaacctctacaagaccttgttcagaaaagccattaagaagactgctgtatgtgacaatgtcaggcgtacatctgtaccttggcatttgctcaaacacttgggttgcatagttgaccagaccattttggcaaagcatgtcaatcagtatattaaaggtcatttcaattagagggcaatcatccctaaacatctgagcaataagctcactagcatcatgccatcgttcagctctacaaaagcccttcaacacagcattaaaaccaagggcatcaggcttacacaccatgctgttcagcaacctgagggcatcatccacgcgccctcgttcagacaaggaattgatgattatattgtaattgacggtgtcaggctcacacccgtacttctccatttgctcaagaacttcgactgcgctgtccactaaattattttggcacaaggaactgatcagcatgctgaatgtagcttcgtttggcgagcaacccttcctaaccatctcagccatcagctcaccgatatcctcccatcgctcggcgatgcataaacccttcaacgcagcattgtagcaaacggtgttgggcttgcatagcatagtgttgagaaggtcgagggcttggtcgacatgcccttgctctgagaatccattgataagggtgctgtaaatgacaacgtcaggagtgcatccgtacctaggcatttggtcgagcagttggacggcgcggtcgagcaacccgttctggcagaaagaacggatctgcgtggcgaatgtcacctcgttgggagggcaacggttcctgatcatctctgccatgagctcctcggcctcctcccacttcttggcgatgcacaagcccttgagcacggtgttgtaggtgtaggtgtcgggcgccacgggcatggaggcgatgaggcggagcgcgtcgtcgaggcggccggagcggcagtacccgtcgatgagcgcggtgtaggtgacgacgttggccgcgccggtcgccctggccgcgccgagcacgcgctccgcgtcggcgaggcggccgtcgcggcagtagcccgcgacgagggtgttgtgcgagacggcgtccgcggcggcggccgccttgagcgcgtcgagcacgcgctccgcgtcggcgaggcggcgggtggcgcagagcttcttgatgagtatgttgcaggagatgagggcggcggcgggggcgggcagcgcgccggggaggaggaggaggcggagcgcggcgtcgaggtccccgagctggacgaggcggcgcagcgtctggccagggcggggcggcgcggccgggttgacccatatggaggagctggccctgcggttcgcccacctggaggaggcggcggcgaggcgggggcgcccgtgttgcttggcgcggcgagggaaagagaaggggtggtgggcggcgggcggcgaggaggaggaggaggtgatggccatggtcgtcggggtggtgaaggatggagaaggcggaggcgataggattcgtgggatggatgaggtggtgcggcggggccgcgggagtgagagtgacgaccaaatgcccgccaattctacttcattccaaccggacttcctcttttttttttcccaagtcctctcttcagtatggtgatgaaattcactgttaactcattctactgcctccaagtctccaaccaaaaaaggttcattttctatagacgaatctagactacgttttgagaagtacatatagaggtttttccctgtgtggtattaaaaaaagatggtgtctgcctctatgccactaaaaagtttgagcctctctctctgccatcgtcgaactttatcgcgccctccatgccatttcatccgttttgggttgtaacggtgggtaacggcagtgcgaaatgacctagttgcccttaggcttgaaatgccatttgatgaagtttgtttccttatgtgccattcggaggcaggcacatgcatgtattttttggcaccaaaggctgtgatgttggtggcaaaggcagggctgttggcgtgtcacgccctggagttccctttccttgtttaaaaaaatcattaaataaatcgaccaaagaaattgtttattttagctcaactaccatgtgcttgcaaaccggctcatctcgacaacagaaaagaacagcaaccgtgcctttcacaagtgcccttattttgcagtttgtgtttcattctctgctcacatattatgtttgggtttttcttttgttgtttgctcacaatgtgttgatggtttggcattcagattggaggatgtcagtattatcagtgggaggatgaaatggtggacactggagtgcaaacacctcatgcccctgctccaattcatacagttcccctacaagcagtggcaccacctggtggtttccctactactccactgcctatcaggcaagatcaagctactggagtggacattagggtgatgcagcagcttaagtggcttgaaaagatggtctatgtttgcatttttcttactttgtatgctattttcaagaagtagttgggtgtgtgtatgagtagtcatggataaatggatgtatggaaggatgaatgaattttcaatcaagaatggtgaaagtataaatggccaggttgaaacaacaccaaatgttagcacataacaacatcaaatgaaacaacataacataactagctatttcatcctttaattagctgtttcatcacataacagcactacatgatagtaccagatgttagcaacagacatgacttagcaaaatacattacttgtttgcatccacataccaacatggcaaagtaagagaccaaaaaaagagtgttttcatcacatggcagatgtttttcactatcatagaacaaaataaaagttttgccatggattaaaagaaccatagaccaaaagaagcacattttactacacctggagcttcttgctcctggtatttctagcagggctgtctgggcttgatgtagtggctgcagcttggggctttctttgggtaagcttccttggggtaagtttcctgctgatgcatatcttcattcttagtgaagcctacggcagtacaatctgcagtggccgggtctcctaggtctcctgttgagtggtctcatcagggcaaggttctaggaacacagattgtagtggtactggatcattggaaccagttgcagaccttgtgctaaaacaaaaacatggtgcattaggtggcatgaagtttttgatgatttgaaggcttgtggtaaagaaaaacatacctgttactcacactgactggttctgagattgtagtagtagtagtagtaatggcatatgccccctttttcttcttgttggcaccagaagaggaagatttcttccttttttttttgtgggatgcattggccattgcttcattggctgggaagaccatctgggagggattagccactaaactggtctctgtgttacatggtacaactttcttcaacctcttctttggtagacccctacatatcaaatgtgttttagttaactaagttattggtgatgtacatgtatatgcaaactaagttatgtacaaagtatacctttccgcctccattgtagctatatcttctaggttgccattcttacatgtataccagtgatggtctaacagatggtagatcgggcactcatgtttctttgacgttttctggctgctacctccctcaagtgatgacttcatcttattcttgtgcctacctccagctatggacttaagcaagggagggcgcatgaagaagtcatgggtagccttgggccacatggtcttgtctggtatggaaggaatataaccctcatatgcagcgctgaatttgttgacagagaagtactcatccacatggttctcaagcttttctccaggaatggatgtaatgtatgctattgcatgcttgcatgggatgtctgagccctgccaacccctacaagaacaggttctatcctttaggctgaccacaaacctgaacccagagccattagtagctttagcgcacagttctgccacaccttctggaggggctgttatcacctcaatatccaggttgtagctctcttctgatccttaagcctctgcaggatgtgaggtagaatttttccattaaacttcttggctaccttcttcctttggttccatttgatcaatattttctgccttatagtgtccagcaagtcatccaagtgctttcccttctctgcctttgtccagttattgaatgactcagccagattgttagtcacataatccatctttgatgcagtcctgtacttgctcctagtccacaacttcttgtgagtttttttgcaaatactttattgcttctggtttggctgcagccattgcttggtagtgcttctcaaatatgtatgggctccatgaatatgaagaagcccataaatgctcatcaaataccttcccactgtacctcttcttgaaattatgtactagatggtacatacattctctatgttcagcagttggaaaaacatcactaacccctttcatgactacctgtccacaatctgtgttgaatgtcaagccatctggggtacctattgcttccttcaatctctccataaaccagaaccagttctcattggtctctgagtcaatcacaccaacagctactggatacatccagttgcgcccatctactacacaagctatgcacaactgtcccctaaacctccctgtcaaaaaagtactatctactgcaagatatggtctacatcctctatgaaatacatcatgctttcagtacgaagaatagcctatgaaatcagatcttcttgtttatggtgtgatgatcaataacaagaaataatccggatttctaagttgaagctactatctgggtccatcctacatatgaacaaggagcacgtaatcattaaaccctaacacggattagtagcaatgggcactaaacatcagtacatcaagggaggcaataaatgtggcctaagacagcgaaatcaaagggggcagcataaaattcacccgtctagaaaccaatccgggcgctcgctggcgccgttccacaccatggctgctcctccccgttcctctcgatgcacggttagatccacgctcccatgctcctccccgccgccgctaggtttcgccaccgtcgccaccgccgctgctagggttttgtcgccatggagagcagggaatcgagagagaagagagtgacacttagggggatgacggtaagcatcggtcaacagacggtccaatatgctagcaattgaaagggaaagagcgacattttccctatccgggcccatatgtgacatgtcagagctgccaaacggttatccccaaatagaatagcgatggaatgatgtggagggcatgataaagttcgacaatggcagagagggaggctcgaactttttagtggcaaagaggcagacagcatcttttttaatgtcacaagaggaaaaacctcacatatagataagtaaccttaaattattgagttattactgttcatccataagatatggaagatcaaaattcctttagagattgtccggcagatgcgcaatagaatttaagcaaattttgctacaggatctcgtgggaatgcggtttcaattgttggacacaggcgtagtaaaatgttgaataaaatcactatgtaaatatggtaatttgctcatggaacccgcttatattattttaatatttttggccatgtgtacaactgaagagaccaaaacactcatccaaccaggttccaaccaaaccaacaacactatcgaaccccatggcagtcgccgccgcaacggtgacgtcgacgatggtgaggaaggcactattcacagcaacttcctctcctcctctgcctctcgtagctggtgtagcctctcccgctccatgcccagtgcttctgccatgccgcacatcgcgctttatccatcggacctactctgatgggtgccccactggcacagacacaatgctcattttgctaccagaagttgtgctaatggctttctcaatcctggttcaattttgggttaattggatccatgccattacaaatatgccgattcagataaataactttataattcgtctattcatatacatgtcattcgaattcgaacaaaattaaaaccatgccatcgccatcgtgttttccatcaccatatagatcaaaatacccctaaacgtgggacccacatgtcagttccatcctcttcctccatcctccctctcttctttcttccccatctctctccatcttgtttcaaatgtgcagccagcaagaagggcacgcctctcatcaccgtcggcatagtcattagcgacgacagcggtagcggggtcattgccgccaccgtcctctcagtccccatgccctcccccctctcattgccactgaggatatgcaagagcgacagacttgctcttaccgactagacacagctgcctgagtgcgcggtggatgcagagccccacctcccagtgccgtcgagctccatggggcatttaaactttttgccactttcagatatggcaattatgaatttgccactcacagtctatgacatgtgggccctcatgtgcatatgacatgtgggtccagtggtaaatccttaattgtcacttgtaatactggcaaatagttaaatatctccctcattgtggctaacacccaccttgcatcctagcacttgctcccctccggctgcaacccaacccaacccagattcaattgaagttgcgcggcatggagcggcggatatagtatataggtatatacagcatataggtagagggagaccccaacaaaattggattggaccccagcctgtctccaaccaaataacttattaaagcccaactaaagaaacaatacatcaaagcttaggttagcccaactagagcccagctattcgtgggaaggtgaaaggaaaaaagtacaccgaaaaaccagatatatgacatccctcaatttacaaaaaccattcactttaggtccttcggtagttttgaccccggttttatcctacgtggcggctgagtcagtgtgagatccacgtggtcaccacatgtcatcgtggccacgtttggcctcctatatctttcccctattctcttcttcctcctctgtctctctctctctcactcttctcttctcttctctaggcaagccggccggcggttggggcggaggccgcccgggcgaggtgggagaggaggaggcggcggcggcggctgcgacgcgggagaaggcgagggctgcggccggtcgcgaatggcatcgacggcgctgcgtcgccgcggtggtgggcacggaggcggaggcagggtcggatgccgcggcggtgggcacagaggtggaggcgtggctgccaggcggagatgccgcagtttcagaatgcgtcggagccggcgaaatggaggtggcgcgcgacggctcccgtggccacgacgaccgtgtcggcgtgcaaggattcggagttcaacgccgacgatgaagattggcgatgctgaaggggcacgaggaggggtcgacggcggtgacagtctcggagaggatcctggtcccgaagcgtacagactgtgcgcagctgtcgctgactggcagcgactgcgggcacgaactggcgggcagttccctccccggccgtcccctcctctccctgcctcttctctctccctctctcacttctctcctcttgggcaggccggccggcgggtggggaggagccgaggagatcctgcgtaacaacgcctagcacgaggcggatgacggtcagcctgatggcgccgtcgttcttggcgaggcggcacgcgaagttgccgacgaaggagacagtgacgagcagcagcactagccatcgaccttgtcgccggcaacaacctcaccgtcccgcgccgctgcgccagcccctcgctgcctcaggtcactgtggtggtggccgcggcgctcgacgcgtgtcacggtatggcctgcctaagaggatagaagtgatagagggagagagaggaggaagggagagagatgacgtggcatcctgatatgtggggcccacatgggtcccacgccgacttagctgccacgtaggataaccggggtcaaaaccactgaaggacctattatgaccggttttgattagttaaggaacgctggatatctgggtttgcggttgggggacaattttgtaactcgatgaccagggaccttccatgtactttttccaaggtgaaacgatgctctgaagtccaaaccgtgtatctcaagactgaattaactgcgtctccggctctccgctccttttcctcgtcagtcgtcggtactcttgacttgagacactgaatcgctgctcttgctcgatccttctccttcgctcaatcactcctctactcagatcaagatcaagtgctgcgcacccgcgcggccgactacacgctgcgtgtaggccacggcgagcgggcattcgcgtacgctcgacttccagtcttccacaagttgcaacttgcaaggtttgtttcctgccattagtccagaattcagattattggattaggccattagttcattcaatattctttagtgctgtcagagtaggagcatcaaatcattttgatttattcaatcattttttttttggttgtccacatgctgcatcgctgcttactgcttgcactagaataactggttggcagtgaccagtgagaagtggttagctaacgttggtgatattgatagtgttcataaccaagcaatgagggattgtgatgctttattgaaaaaagagcagcacattgatgtttctttgaacagccaaagtaatgctgagaaaattgcttattatactcgattaaatggctcaattgatgttactagactcttactgaagcaaggtatgccttttcggggccatgatgagagtgaggaggtctctcaataaaggaaatttcaaggaatttcatgcttataccgcagagcaaaatccagctttacacaattttttttggggaagctttacacaaggttgcaggtaaaaatgctcctggtaatagtaatagtcagtatacatcttcatagattcaaaataacatcatatgttgctttccaaaagaggtactgtgttctattcttgaagaagttgggaatgatgttttctgtttgctggttgattagtcaagggatgtgtcttagaaggaacaaatggcagtggtcctgccttatgttggtaaatgtggcagtgttaaagacagactagttggccttgttcatgttaaggagacgacatctatgtaccttaagtctgctattgatgatttatttgcggagcataagctaagtttgaaacaagtgagagggcaaggatacgatggtgctagcaacatgagaggggagttcaatggtttgcaatcactaattatgagagaaaatagctcagcatattacgttcactgctttgcacaccagcttcagctagtagttgtgaccattgtaaagaagcataaaggaatcgggaactttttttgatatgatttctcttttattaaatgtggttggtggatctttcaaaagaagggatatgattcgagatatatatgcagaacatgtgcatgatgctttagaatgtgggttacttataactagttcagaggtctggagatactcattggagctctcactatgagacactaaagagtttggttcaattgttccctacaatagttaaagttctagagtatatggaagagaatgacagggatgacaaaaaattgtgttttatttgcagcttatgttgaatatcttggcaatcgcaaacaccttgtctgtaactttacaaagaaaggatcaagacattgtcaatgctattaattgtgtaaaatcaactagaaatcgcttggatgagtttaggagttagaggacgattccaactcatcctcccgcctttatatttcccttggccaccatagaacaactcgggttttgtttagatcaaaatttagctttggtatttttccgtgtaatcctgtcatcgattagaacaactcgggtttgcttgttacggaaccccatctgtgatatttttgctgattcaatcctacatctttatttgcaaatcgagttgcctgttcatctttttcttactagttctcgattgcttgcaggaacaaatgccctcgtggttgggctaaccatgcatccgtcgagattcatgactgcctctagagttggtgtaacgattgcaaaggtgtaacgtctctagatagttatagtcggatctccaacgtcgctccattcaatcaaattgtcctctcatcgaaagatcgggacaccctcgtgcgcatcaccttaagttgcattgtgcaaccagcccattaaggcctaatagaggagaaaatatctcatgggcccgaaattctgtgttttacatccaaaagttaggtttacaagtatcctatatattcttctaattatccctaatatctacactaaatgttttatttcatttcttaatgttgttctgtttagctacacaactcacggtcaccgcacaaatatcacggttaccgcatcaaaccgtgcggtaaccgcgaccaaaccatgaaactgcaaaatttggaattcaagtatttgctgatgaaattcacacggttttcggcggttaccttgtgcgataacccccctccaaatggtaagggaaaccctgctcatcactagcaaggcgagagccgcaagacagaatattatagtaggattcagaatttgattacaaataaaacaacaaagggcttgttggcttcattaccaaaaaaacattactaccatttttttaatgctaaagtttagtagtgttttgtttgaggtctttctaaattctaaattctagtataagttttgttagagttgcgttggtaattatatgtttagttgttaccttataattttggtattaacaaaatttaaaatggttgaaaatcattataaggtgaacatgaccgacatgatctacttcatatgtcccaaattaagttaatccaatatggtacgtgatatatctagtactacgaatttagtactagaatatgtcacatttcatacgagattaatttaatttgagacagaattcgaagcaatagcatacgtactatctagctggggcatgttgggctgctcagctcaaacctgggccaactaaaaagcttccatttgcagttgtacgaatttaggaagaagtttatttaggtccctcgtctaaggatcaagtttagaccacatctctaaacagagaaattgggtagaacacattcctcatcttccaaaaccagtgtcgatatagtcccacaggtagtttcggctgacgtagcacccgttgtgcaatcatgaagaccaagtcaacatgtcaagtgggtgccacgttagttgaaattgccatccaaaccgcctttgggctatatttgcactaattttgaaagataagagatgtgttgtatcccttttgcgattaagggacgtgatctgaacttaaaccttacgagagacctaaaatgaactttcttatggatttaaaccaaacacctcatgtgcggatagtgggctgcagtgagaaatgctccaatgtgtaagatttatgataggttaaaattcaaaataggcatcttattatctatataccactttaaaagcttagctattgtcacccacaactgctttcatcgtaaacttttcttagtattaaaaacaactaaatataagtggatagttacatgtaaaatcgaaataaggcaaatatgtcccacaacaaacaatgggcaacacacttcgtgaaaaatacatttatccataccaaagtacgggtagctagtcataattaaaacaagggaaaattccctacgtatccttaaaattttccacaatctcttctatacctctaaattttgcctcatctcctacatgctatgaagttttcattttgatcccctctatccctattatgttagttggccattagtttttcaaaatgacgatattgcccctttgccatacttatttgctactacttcatcataaatctcatgtgaaaatttgcaatttacaataacatcaaattgagacaaaattatttgatgtaaaagttgaaaaaaattcaaacttttgaaaagaatttttttttaattcccatttcttggttctgctggtttgctcattcatttcgaatccgtataagagtttcatctagaaattgaaaaccgaaattattaattttggggttttaaattttagtgaaatgctctacgaattccatgagtcaatttgaaatttattaattttttttaatttatttctaaaatttgtggtgaaataattaattattccgtttgtgttcttacaaataaattctttaacatgagaattgtgttttgtgattaaactagaacataagtttgagagaagggcaatatagtcaatatgaaaaatatttaacggtgaactcatggcaactaacgagatggatataaagaggagattaaaatgaaaacttagaagcaagggatacgagaaatttttgtggacacatagggaatttcctataaaaatatgtaggaagtataaaccaaaaactaggtgtaaacatgaccaaacgtacttctttctaattgtacaatttccattaactatgtgcatgcttagttgatgtagaggttggatatatgtttatagtctactgaatattaaaaaaaatatatgcatttccatcttttaaaatattttggcccaacagttggcaaactatagatgatatgtcaatttttatggactacgttgcgagattttgtgtaaaaactaattacaattgaaaaggagtgcaaattgcactctgggacaaatttcaaaagattttgctttcaaagagtcagcaaacattttttgggatatatagaaaccgcgccaaacgattttcttgcaaacatttgaagacctctcaaatccttgcttggggtaaagaaatggccttgctggccatgtaaattggaccgcccacttgcattatacatatataaaatatatctacaaataaagctcttgttgcattatgactaagactgctatatcccaaaatttcacatataacacaaaaatttacaacaccgaattgggtccgcctaaaaagttatatatgcaatgcactggtatgtgccttcacgttctgaaatatccatacaaacaaatcggctctcttgactgccaactagtcaaggtgagcatgaacctgacaacacctgcaaaacgtaagccaaatgaacaattgtccaatcaatcaatatctattactctccgcgtcccataatataagtgattttgacttgtttgcttcaactgtttgaccattcgtcttattaaaaaaatttaaaattattatttattttatttctgacttactttattatccaaagtactttaagcacaacttctcgttttttatatttgcataatttttttaaataagatgagtggtcaaacaatacaagcaaaaagtcaaaatcccttatattatgggacggagggagtagcagcaaaaaatgagttgcaaatcatttaaagacctctcaaatccttactcttttgggggaaaatttgttaaaccaagaacaaatcccaccagaataaggccaaaaacaaatatcgcaccagaggctcagctcagctgctcttaacgtttggtatatgtccctcttataacattttccttagctttaagagaataatgataggtgtgcccatacctctgcagtcgaagagtagcacggcattgcttgtatcatgctcaagcgcaaatattaattcaaaaataattttctgagacatcatcatgcaagtgtatctagtgtcgatcctttgatgagagcatttgtcatctaaccatatgataagtcctgaacggtacgaccactagtgttgcgaggggcatatggtcttggtaccttccatctcagcaattcctgaagaatgttgacagaacccttcatattaaccaaacgagactagaaaacttgctcaatactgtaacaagtagttagctgaacatgtatacatatccggatgactaaaagaacaaaatgccattcctctgtacaacacggagaccttgataacacaaagctaagccatgttgcacgtgataaaagaacagtacgcatgacatgttattatatgtagaacagtacaagttgccattcacacgctcctactcacaagaagtccatttacctttgttgattttggaccataggccttatacgctccgtcaattgatgagtaaatcagtgtagcttgatcagacccacgattacacttgaccaaccgaacaacctccctagaatttgtgggcttagctttcaggtacaaaataagctttgaaggtaaggatcctggagcatcctttttcccatgggtcatttctacagtcaccaaatcatcccacaatacatcccagattacagagcacggatcctttgcaggactgaactttctctgggtcatcattgggacctgaaatacaatcatatgataaatagaatgaacagtacaaaccgtaatgtaactagaatctacgtttgtcttacctgaagcagtagtactcttctgtgagtaattaaaagaattttacccttaggtagcataaaatgatcctcataagcatcagtagatgcaaactttccccggactttgaaaaggtcaacttggccaagaaatgtagcatattcagctaattgtaagatagcctaaaaagcaccgccaaaaaggattaagaataccatttgaaacaaatgagatcgccaccggcttgagggagagaatgctagttacctggccagctgctttatggtcgtcataaggatagagcaagctatcaccaccaatggctcgagggagacgcctacgagccaactgctcctcagccattatagctgatgatattttcattttcacagcatttgcaccttctgtagttttcgacaaaagatcaagaactccactcactggctgagcggctgcaccaattaaaccttttccgacaccttgcacaaagccctcaacaccagaagattttgcaccctcaatgggctttgtcaatatgcctgtaacacctctgaagatgccctttgcgagagccccacctccatctcgtatgacatcaccaaagtcttccactcctttgctatcctggagaaacattacgaaccacaaagtacatgttatcataacatactacttttatacagttcaatacatgcatacgtagaaagaaatgaacctgtctcattcggccctgaatgaatttcttgtccatggataatgctgctatacccttactcatattactcaaagcgctacttgcattgccaagaatgtcaacacccgaaagtaattgaagaggttggctgagaatatctttctgaatgttagacatagcagaactcattagtgcactttgtctcatgcacaattcttcccgatacctttgagctatgcggaccttcattgttaagataaaggaatcagtgcttaaaataattagagtagcgtacatcagcgtatagggacaataatgtaccatggcatgaaagtttttctcaaacatgcataacggtatgaaagtttgcagaagataattgtaatggaaaccaaagagagggagggagatattataaaaaagaaagactagttaacaacatttaactgattccctaccggcatgtgctccatgtttcccagtgccgtcattaaggaagaccagaacccaagaacccctctcggcctctgggtaggggacattgccattgagactctaaatcgtatttcagaaatattaagaagcctgcaacaaaagatttagtaccaacaacagggaaaaaatataagaaaaaaacacaacatgcaatagtgtgcgtacccaatcttcagtatagggtcaactgagacagcagaagactctgaactggatatcctatcaaattttaggttctgaatcatctcatggaggcgccaaataattggctcatggatattaacaaaaaacacacagttctcaggaacctacaagcattacataattattatcgcaacaaatatttaaagacatactccctccgtttcaaaatgtttgacaccattgactttttagcacatgtttaaccgttcgtcttattcaaaaaaaattaatgaaatatgtaaaattatgtgtacatgaaagtatatttaacaatgaatcaaatgatatgaaaagaataaataattacttaaattttttgaataagacgaatggtcaaacacgtactaaaaagtcaacggtgtcaaacattttgaaatggagggaatatatgataacttcatgtacaactaggaaactgtcatgaataaaacccaagcaagaccaagtaaaaaaaaacttactcacacggctgtttgataaagctatgctactcaaaagacaatctcataaggaaaaaacatctatgtgaaaatatctatgttaaaataagatttattaataacccatgtagacagatcacctgcacaccaagatatggataaacacaaaattcgagagaattattggtctgcaatgtcatagagaacttgatgatgtagtctgattgattctccatcctttgaggacaaaaaaggacaggcataagaacgaaaggtaactgattgtccacttgaatccaatgcatctgcattttgagcctgccattaaaagaagcaacaaattgaagtacggaaaaaagtagaaaattttgagcggaaaacagcaacctagcaaataaccaaaaacacatgattgtcacctattgattccagagcccattccagatgagtaggctagtaatagttgctgcactgagaggaaaagaatttcctcaggcatatggtcaattatggaaagtccaaactctgttagctccaaagtaacatgaaattcactatccagatctggagatgactgcccactgtcgacctctgatggctgaaatattggtgataatagcctttctgttgtctgttcccgagttctattatcaggcagccaatcattaatttgggtaacatgaaactttccctccttaagaacagtgacacgcaaagccttcttcaccctgcttgatgcagctagcggttggtgatccatgacaacatcaatgtcatatgtcatggaggttgtagggtcacttccatctactaatacttccaaaagacgccttctgccaatatcctcccaaaagaaggaagccgatgaatttggaggcagactacgccatgaataatcatcaccaccaacctgccgaaaccgtacaggcaagaacatggagcggttctctaccctgcatgtattgtttatattttattttagatatgtacgatttatgataaaataaatttcgtgtaagtatgcttacctgtaagggctggaccagcaagcgagctgaaatacaacttcataacgtgaacattttgttccacttctaacgtttactctcaccaaagcttgatcatttcctgtagtgttgttcatgagcacacacataaccccattagcatcaatgctaaaaggtgtactccatttgtatccctccaaccgcaactgcaagcgtaaagaattgtgaggttgagaagtagaaaagttaataaccaaaaccatttatatgtatgcaggaagtagcagttcagagtataaaagttaacctttaaaagttcgttcccaaattctgatcgccattgaaacgcttgaggaggactacttggatgtaaatgctcttcagtctcactatgatactcagataggataatacttcttccaattctattgataaaaagtgctcgtgggagaaaatttataacctgcattatcagtcaacatttttctgaaaaccttttatgttattacataatttaactaaacatagtgaacaaggacagaatactctttaacaaacaattcgaggtgttgcatattgcattcccttgagcagtaaatgaaaaacttgaaaaatcatatatgtaaaaatttaattgttgtaaatcatatatgtaaaaaatttaattgttgtttcctatctctgaacatgtcctaacacaatattaggattaattgctttacttgcttccattgcaacttgctggaactttgtcaacatgctaagtaatatggtgttttaatctttcaaatactccatagcacagtagtatggtaaatgacctagtttccatctagtaaattcttttgagacaacattcaattgctgaacaactttaattgcgaaaaataatcatgctgaaccaaagtatgaagcaatgaagatgtgaagacacagaatcaaaccttagttctgtctgaagtcatcttcagctgagccgagaaccagtaatatgacccatcagaagtaaatgctttgacatcaacatgctcctgcaccagatgaatgacacttgaagagaagataagcaatagttcaaacgtgtgtaaaaccacaaactataccttgttctcaagatcaaaaagggacactcctatactgtattgtttgcaactgccaacagccacacaaatcgcaactcgtgctgggctggaattgttatcccgagattcaaagcgcacacctgcagagcggttcatgtaatcctgtggcgacaacattacatagtctgtactacaatcttctataacctccaatatgtgcatatttctctgtgccactgggcctcttctgataagagattttgaagaatatctgagggaaaattttgaagatttagctgctctgcttagtgagtctggtctgctaagtgactctgcatctgagttttctgttggttccacctcaacgatgcgatatgatagtggaattgaagaaatattttttatccaatatggaacaaataatctcagtgtcttcggtgcagcatcacttgctcccagatcatgttcaacactaacacgaagtctcctaatatttgacacaagtaaaatgactagaaattatgacatatcaactaacaagaaaacatgaaacagtagatcaactgcactaacactcttttttcaaattgtgtcttaagaaatatatgagattaccatcaataagcctattaaaaccgtatctttcacaaaggcataagtagctaatgaacaagagaattttggaaaaggacccatttttaaattggaataataattaattataacagtagtccctagggccctccttcacctgacgcttttctactacaatcattttgtatgacccctgtaataaatgtatacacttgctcttaactaacattcaccaaaaaaaaaaggtattagagcaactaattttgacccgatcatgcatagagaagaccatgactaggagaggaaagtcctaatagtgaagatcctgaaggtgacaagtcaacagaactacagatagagtgcagtgaaagaaaaaagtagttcagaaaaaatggtggctaaatactagataccaccaatggttcaaatcaaatttgcatagtagtattgtatatgttacagattagaaaatgcagtagggtctattccaaatatgctggtaaaatgagatgggcaaatatgttggacatgactatgttgtttgtttgcactgttctggctgtgtttagaaacttctgtgttgaattgaaattcatatcaattgtttagataaccacactaagcaaatgaaacactaggggtactgttaaagcttacaaacctctggctcctattttgaaccatccagaatgaagtaacatgttccagggacattaagtccagtattaatacagtgtcctaaaatgaaaatgagaaacaaaaggttagagaattaaaacatcattttgtgcgttgagcaactttatgtgagccaaggcaaacatgttcagtcttgccatatagataaagcactctttaattccataagtaatttatgggaacaacacttttcctcagaagataaaacaactagtgatgactatcaaagcagggaagcacaatgtgcattccagcagattcatcacatacgtgtagtctagaactctaggcacattatgataacaggcaccatggttaggcttccaatgtttaagttatattaccttctctataatccagccattttggacaaacatagttaggtaaattggtttccggatatctgctgaatagataaatgcacttccaccagacgagacaataccatgctgcctttcaaccatactaccttccgtggacttctcccagatagcatactcggcttcatatggaagcttattttcgagtctaagaattgagttgaaacaaattttccagtcataaataggcatatttaagtctgtgtgaagaatggaagcatcaattccaacactaagccagaaattttgtttaatgccaacaggaggacagcaatatgaaagcatatcctttttctcaagatcagccagtctaagaactgaattctttgagggcacagatgactgctttaaggtgctttgccttgaaagtgaagattgttgttgcttgggaatgctctcagaacctagtgaaagaacctgactccaactatatgattcctgtgatttttcagaaaaagggcgaacttgcaagcacaaatccatatccttgatcatcgctgtccaaggcaatgcagtagatgcatgaggctccataacagcaattattttcctaggaatttctgcactttgttcttgcattgactgccgtgaacgcacccaccgccttcgcctaacaaagtcatgtggtgatttggaagatttccaggaagatggccagttcaaattttgaaaattggcagcatacgcccatccatcactatccacggaactagatatttcaattttccatggtgacgtccatttccagccaggtggaagacgaggttcaaagaatgccttcaaaataaatcacacatttctctttaggaggcaaccatttatgatatatttaaggatattttgcatcacaaaaagccaaagatatcagcagaaccttttattaatcaagcaaaaagaatttcagtggccaattagtctgaaagaagttaccttagatgagtaagagccgtcctttgtgctccatggccctacatcacaaccctgatcactagcagggttacttccccaccctgaagttggtcggtaccactgattttcaaatacttcatcaataatgcttgtggaactggtggaaccagcatttgacacagagctactatgcatggttacaggacagacagatacttcaagctttatgtcaaaaccatttgcaataatagcaagagcccttaagcttgcatgtttctttccattcctcatggtgacctcaagtgcaaaatggctgttgttaagtgatttggggatggttgacaatggcaaagctgcagtaaaacattcccatggaccatctgggccaagccctatccagaaaccactctttgcattgcttaagctgtctttccagctctggaagttcgtctgcgtagatctttctacgtaacaacttgaaagtactaacataccacagtgtttcacattttcatgattgagtgcttggccctagaagttgaagcaaggagctcagcatatgaagtgacaagcagaattaacccaaagttcagcaatgctatttgctcacaacattgcctatataaattagcagtttaaagaacaaaattaataccttccttgtaagaggacatgttagcacacgcttgacatcagcagcttgctgaatgatcctcatagaagcagctcgtttcaatattgttgcaccccgtccaataggaattgacaatgaaccaagtacttcaccttatgcattgatggaagatgttaagaaaccctaatactattggatcaacaattacaggagataacttaaatactactatattacagtaggtgtatccttcaaataattcaggttctaataactcaagaagttacctttcccagcctttgatgcaagatttgttacctcaatctctaaatgagcggatgcctgcaaagtaaagaaaatgaataatgcaatgctgctaacaattttgcaaaaaaaaaaaacatagagtaaactggaatggtactatgagacgtgaataaaaatggcaggtcaaattacctgctctggcacttcaaatataaaatgttcattccacttagcatgatgtgtctgtgattcacaagttttcaaaggttttacacatcttgtcctggcactctgagggaatatcttgtactggtcagaaacatcacttccaacaagcaagcgcaaagcacagaagtagctgtgatcattgccatcatccataataggcaaaccctacatgagaagaaagcagttagttcatatcaaaagcattgtatttgaaaagcaaaacgcgtatctgagtatgaccttggattcaaagatctgtatgataacataatatcttgattccgtagaattggacagtacacttagtttatcagaaaacctgggaggtggcataaacaatgagacttgattctcatgctgtagcagctcaataatgtcttcattgtcttcaagtttcttaacataaatatcacatcctaatttgttctcaaaaactattctctgaaaatcatcttcatccaaagcagagcaggacaaatcatcagcatttttcacactgtcaactgtatcctgtcaaaagggtacacatgctatcaaccatgaatcatgctgtcaaaaagcacagaaacagaatcatgaataaactggagggataagttgaaacctcattctttattgatgattttttttccagatcgatttgtcttttccatgaaattaaagtttctataagcaaatcaagatttgcagaactcaggttgacatttagaggacttgtggcagcaacacgaatcctcttaccgacttttgaaggagggtgtttactggtatcatatgtctcaaaccttcaattatgattaaacaatgttaagttagtggcataaaaatctagaagataatgcaactttaagttaaaataagcacaacttacttgaatatcccatcaaatggctcaacaaaaggttcccatgcttccaggtgtctattgaatgttgatgcagaaatcgaacagatcaatacagcattcattgtctcaaattttccatgtgttgcaagatttatatttgcgattgtagtgtcaaaaattggcgtgacctaaaattttggaaatatagttggcatgtagatagaaatatttgaatgatatatattctcagtccaaaaaagaataaaatttagcatgcgtacacaccattccacaggaactgtcaagaatgctgactgacaagcatccaaacttcagctcagcagtaatattttcccgcacctttggtttagcatggtctgctattctgtatgccatttgagctggtggttttttcgtatcagatgttgccaggaaagtgcagccctaaaaacacagcaaattgattgggttcctataattacataagttagaatgatgcaggtataatggattacctggtttgaaactttccaaatgctccagcagttaggtcccttcgagctagaggacctggatataggatcctctaagatatttgcatgattcaccagacccatcttcggacagcaaacggaatcattgcttggcatttcatctgtttttgttgcaacacatccaagagaagcatatccaggaggcggcactggataccagaagaataatatttcatcagaaccctttctatcaatctgggctacttttttaaactgagtaggcctttcagaaacaattgcgctgtcgcacttaaaaagaataccaagagtaggtggttcaaacctgaaagaagcatcaagcatattaacaacgtaccacaaagaagtacctatgtgtgtatataaagaaatcattacccttcagttatacaatcaccaactgaggaaaacccaaaacgaggtattggccgccatatagaaaatggtctttttgtatctccacctttgtcccaccatattctttcaaagtgtggagtagacatgcaatagctgcttggccttgacaaatttctaacagcatcccaaccagaagtactcttgcgatgagttaactgatcagcaggctggttactccgaacagaagaatctgcattcaaatctttaacaatatagcagttgggattccggagaagaacatggtgcaaatcaagagcttcaactctagtgggttgttcaatagaattgtgtgcatggaaggaagcaatcacattgtcgacacgccagatgctaaatccaggagttactctgcacaaagaatataaacacgatgaccaactacatgttctcagtgttcataattaaataataactaggcactcgacactttccagggaaagaaaataagaaaaaaaaatattgcacaacaaaacaataaaaggatgttgccatacccaggagtaggtgagagagtgtggatacaatcagaaaaagctgtagaagtcacaagatctgagcgaaggcagtacactacgtgatttgaaggtggttgtcttccaatattgaccacacaccctagagctatgtatccaggtggtggaacaggaatccagatagaacactcattgtcctcagctgcctgagatgaattcatttgctctagagatacaggtaatacatgaacaagcctaaatccaagaggtttccgtacacggccataggtattacttacagcaaccacaacctgagaaggtggcacacacctgacaaggtaaagtatcagctttggcaggacaaaaggatctccgtaaaagagaaacatagttcagcgtatggaaggcggtattaaaaactattcgcattcaattagacgcaagccctagtattcacctgggattccgaacattatacacatgactacatataactgttgcagtagctttaataatactcaaataacagttgacgatataggttctcaagtggcaaaaattaccttgaggacacacaatcacccaaaataacataatttgaaggagcttgtggcctccaaaaggtgagattgtacccaggcaactcacctgtggaatttcatcaaagaaggtaaaaattggtgtacccagaagagcaaacagaaaactactataatacaaaagcagctaagctaagttgcagaaaccatgaaaaatagtaagagttagaggaagtagcacacaagtaccattaggtgatgtccaaactcgcttaaagttaatacaagaaaccaatgggttattattgccaaactgcaatgcagcaagagtttgattttgcagtttgagcaagagagaagccacactcagagaaagatgaatgtatacatcagtagatgcaagtactatgtttgtcttttcactgacagaagtatatttccatgaaacatcaacaggttcaagaacaagaagaccagagccagcttcgatcgtaaggtctttaacaactgatcgagcccatatgtctttttcctttgaggcatacctgttaaaatgcacaacgattttatcaatcaacagagaaaactgacatgtatacaacaataaatcgacatattgatggcttagcagaggtaatgtaatgaagacaaacatgaaactgaaatccatcttggcgcgaagaagcttctcgatgtgcaaggaatcatcaattgataactttgaactgtcgtaaaaggtaaattctggggatacaacctgaatattccagaaatgagaaatgtgagacattcaacaccataaatgtgcataagtccagaatcaatacacttacaattcaacttaataagagcaaccggatgtttgtttttaagtaaagaagaaatgcacataatgtgagtagggaatttattccatgaacaaaacagttggtgaggagaaagaaacttgttaatgcctgtttgtagactaaggaagcaacttggtacactacgggtaattgtccaatttataattatttaactaccttttcttatactcttcctttttcataaaatttccagaagcaaacagtgctaacaaataatgaattaggagttaacgcaacaaacattacacgctttcccaaaacctactgtggtgacataccacaaatcctacaactctgggcactcttccagatagttcatgcaccatgctagttcaccacactcggtcactcaggcttatatccaaggtttcaattgctaaactttttgcaggcttgtaagttttaccgtcttaagaaaaagaacagaaaaaaggtcctaaaattacagaaatttaagcagtatatactatttagcaactctcaaaaatacattagaggagcttgcgtaaaatctaattatgtacctgagcctcaaatgtaaaattcagcatttgggccgagggggtatctgcaccaggctgaagagcattaattctcttatattcttcattttgcgtattatcatcttcattatcatttagagaactttctaatactgaaacttcaacgccatcttcagcagaaattgagtagctgcttccagcattcaaatatacacacctccgcagtaatgcaccgttcttttatgaaacaaatagccaagagatgtgtaagtttggccaaagaataatagtgagactggcaacaggacataaaaccataaaaaaaaatcactgagcagatacctcaatcttaacatttttgaatctaagttttttgccccgccccaaaataattatagtccctgagtataactggcccttcttgtcatattcgtcacataaagatatggtgcctccacagccatcgtaagtgaaatcatcaatatcgcaaccatcaactattagctgcctcccaggagatagttgaataaaattctctctctggaagaaaacaggctcacaaagtatgatgtcatctgacttaataagaggatcattctttggatctagactttcctcccggccggttattgtgcctagatttggaacaaaaaactcaacaacaggcagcagaaaatccaggacaacaagtacacgaggttcctgaattcttataacaaatgactgaaaggaagaacgccatcgataatccaatatcaccatggtgaggttggaaacccccacatcagatgaagggtcctgagtactcagcttagaagtctcagaataagatccaagcataaggcgcatctcggactttgtatctggacggatatcatggatcaagaattttagtatagacaaataaaggtccatctcaaatagtgaagttgtcctataagaaacccataaaccttccagctattaaaaaatgaataaaaaagtgtcagtaataaccaacatgatattaacacacaaaaaaaaaggcacacaaaaagtagtacaaaaatgcagatgacaaaggaatgatatatttatagtaccaaaaataaaaatttgcagaaacatttccctctgcaacagcacaagataactcaccacaagctctgctagaggtgactcagcatctggaccattgcgaagctcaaacaatgcatactggacatccacagtcattactacaacagtacgcgatagtaacaaatggttgttgagattaactttatctgcaagtagacgaattgaatcttttgtccgatttacattatcacggaaacctggggggaggttgggcgcttctgataggtttgtcgaaatgcaacttgtgatgacattgtattccttatctgacatgataccatggagcaaccctatctgcataagaaaaaaaatgataatcatataaaacacttgttttttttgcatttttccactatatatgaagtttatcagcccagttcttttctgacgaatggattaatgggcatgcttcccgagctcctaaacagtgcgaatttttgcaaaaactctctgaatttcttagaagactgttttaaatccattttcaatttttaacagttaattcattcaggtgtactcaatagaagagcttacatttcagatctaatgcaaaaatgaaactgataaactgagtaaatcaaattatttagagtaaattccagaaaaaaaatctgtgttttatgttcaaagttgcacttgcagaaaagcacatatattagaacttgtggcacataatatactcattttttacactgaaccagtaacaaaacctttctggagattgatgctacacagtaaagctattctccacttttaatagagcttttaaatcatggcctttgaagtgaatcattccacagataactaagtccaatctaaagtatgaaacaatggtgataaaaaagtgagataatcagcaatataaaagtactgtcacgtcacaagaaaacacttttaagtataaaaacaaattaatcacctgaaatttcatgcagagcatcgggacccttttgaaaacatcccgcaagctacgtcgcacttctatattgatgccatgaccttctctaatcatactctttcctagaataccattgactccaaccgccatgttgattccattaatctatttcagtatcattgaagcagaagaataagaaaactagataagcatactgagattagtaaagtgaccaattttccattccaatacatacctctgcttgaagaatatcaaggcgtacagcagaaggatcactctcttcacctccacgccagcaaaaaccattcctaactttcagttgtcccagatccagttgtatatagctgcagcatgatatgaaggtgatgtcaagctttctaagtattattaaatcaccattatgcttcactaaacttgcccacaatcaaaataaaaaagtgcggactaaaatgaacaaattagtatatgtagacacaggtataagaaatgtgcacacaaaatgcaaaaccatgtgcctttctccactatgattcagaattgcacacctacaatatatggtgtagatttagactacaaacaggaaatttcttatctacctgatcctaaagaactaaatcaactaataaaaccaaaaccaaacacatgtactggaaaattgaaataagggcatactctttgctctgggagttctttggaacaataattatgggtgtgtcaagtgaaagatccagctttatagcagaagcaccatctatttcatatttctgaatcaaccactcgaaacctccaactttgtcgatgaacttgattgcttcttcagtgtgaggggtggcaagctccatgaagtaagaggtgaactgcaaaatagaaggcactttcagaaagatgtacatggtcatggataacaagaacaaacagcttgcaagtgtaacacatacctcctgaacaaaacgataaaggaatacaattcgcacagcagaaagttgcccaatcagactatagttgtaaccttcatagtcatcatcgtcaacgctgtaagactggaacgcaaactgcaacagagaggaaacattaagatttcagtattttgtcggccacaacacaagatagtcttgtttagtttgactgccacaaccaaataaattatagttagctcttaagaagattaaaatggtaaattagtttgcatagagtacaaagtttgagatggaaatctgatgcactgtcgataaagagagaatcaaggttaaaacagaggataatcaaccattctaggcagattcactgatgaggtaaaaacccaggtacttgaacagatgatggaacacgagtagggataggtgacgaaatcaatgtgctattaaacaattaaatatatatggtcatgttggaaaactattttaatacgaagttagttaattggttgaaagcctttctttttcaatatcaatggacaaaagctctttgataatctagtcaaatctactatttgaatctcaaggcagcaaatatgattatacatgtccgcatcatactcttcatcttgctaacctttacaaaacaaaaagtaagcatcaatatacatatttgatagtaaaatggcatacctgacagcctacaatgtactaaagtattgaagagatgaactatgactactctattggtgcagctgtctgggaatgaacaactgacacctgtataaaggattgcaaaccaatgtcaataatacctttataagagattcaacacctggtttccgtatatcacatagccaaccccaacgatgttctggcccaagagacatgtcacaaaatctcatattacccagcataccatcaattgaaaatgaacctggatgaacctgatatataaaaaatcagaagaaacaatataaaaacacatatgcatgcagcttaacaatgaataaaaagaaaagacgcacaataaaattctaacaggcaagtaatcaacctaaaattttaaatgcaacaacatagcgatcttgtcctagattgctgccttcatggatgattttggggggaacatcatagttttaattactttagtaataatttataaattgaacctttcatcaactaattacatatgctatcaccatatcctagataatgtcctagattgccacgttcatggaaggttttctagggaatttcatagttcttgaattactttaataatattgtatacattacacctttcattaactaattacatattccatcaccagatagatgttctagtatattactttgataatttcattatttagtccaaatacattaacctcaccttcagatcaaacagaaatttctcctgcacaaacatcgcaagctgagaaccatcttccttgttaagaaacatagatacccgatccacatccatcttcatgttgaagatagttcggcgttttccatagcctagcaaacctttaacaaaattgcgagcattatcttccatccctgtaggtttgacgttgcgtactgcaggtgttgtatcagagtcaccctttggggcagaattaaccatgctaagatcaaatccaaactcaatcagagcaacaagagttggtctgttacagtagaattccagtgcagacatacggatacacatctgtaaaaagcaagatacaaaaataatcaaacttcacagagagatttacaatctaggaagttaaacatatcaacaagatgtacattttgtgattttaggactagatatattgcttctatagttctcgcttggaataaatctatgtaacagtaaaagatgaatatattaaattacctgcgaatctataccatcataaagacaagaatcaggagtcctggtcaaaaatgtaaggacaacaaaatcgttaatattattgtcttgtgcctcgtaaaatacttccgtaggcttcactttctgctgatccccatcaaagcttaaaccatctttcgaacttaattgagtatgcccatctggatcaaatattgagttggaaggaatttccaaatcttgaagatttggactttggtcaggagtgaaatctgtcagcgcatccatgaaagaatcttcctcaacagagaaggattttcgatgatcctcctcatcaggtgaactagaatctacagtttccaaattgtcattgataacagagcatgctagataatttgaagacatagagagacgaccctgaagctcatcctttatcttcaaagaatgcagttttgtttttacactcaaaccacgagaagattgaacaacattaacctgcaacattatatgaaatataagtgatggataaaaagaaatgaagacaagacccagtaatctagatctataacaagcactgaaacaaaaagctgtgaaataaaatctatcatcaatgcacagatctagaaaacaagcatcacattcatttgatagaaggaaaataactctgctcttgtatctgttgaattgcatgtgccagcccagtggtcccagccagttcaacccaaaagcttaagctgatgagcaaaggtgcgattcacttatacttcaacactccccacgtggaagctccctcaggcctcagacatgcaatagaagtggactacattttttttatttaattgtgtcatccaacattcaaactcgagacctctagctctgataccatattgagttgcaagccagttcaacccacaagcttaagttgatgagtgatgaagcacgcaggcaatcacctatacctcaatataagcatatgaaggcacaccagactgaagttaacgagaagagcaagcaggcaggactatgttgtgagtctgccacaacaagaaggcgagaaggcgaaagaaggcgaaacatcagtccacctatacagaaggcgaaagaagactcacaagaaatgcagcatgccaatctagcagcaataaagaagtctgtctgaaaggcaatgtcacaactaaacactaactgcaagagatgaaaaacaccgaattatggcaaaccgtctggcgcctttgctccctggtatggtttctgtgaaccaaagcgcttttgttaagcgtagaagcatacatgacaattttttgcttgtccaacaaatggctagaaggctgtacagtaagaaagaagcccatgttatgcttaaacttgatatttcgaaggcttttgattcggtcgactggtcctttcttcttgaagttttgtgccatttgggttttgggagacgatggtgtaatttgctttgccttttgctgtcaacctcctccacaagagttttggtgaatggagagcccggcaaggatattgctctttgtagaggcctccggcaaggtgaccccttgtctcctttgctttttatcttggttatggacgtgctgaactcagttgtagtgcatgcggatcatggaaatctactagaacctcttgctgtcccgcagacagcacaccgggtttctctgtatgcggatgatgtggtcatgttcttgcgtcctacaagcggggacctatctcttatcaagcagattttggaggtttttggtcaaatttctggactaagaaccaatatgacaaagagctcatgcactcctattcactgcttggaagatgatctagaagtgatttctaatgagttgtcttgtgaagtgaagaatttcccttgctcttatctcggacttcctcttacagtccgaaaaccaaccaagacagatttgttgccccttgtggacaaagtggcagataatttaccgggttggaaagcctctttaatgaacaaggcaggtcggcttataacagttagggtggtcctcttggctattcctatttatgcaatgatttcgttggatcttcctaagtgggtggtcaaggctatagataaaaggcgccgcggcttcttatggaagggaagagaaaatactaatggaggaaattgcttgatatcttgggaccgtgtgtgtcggcctttgtcctatggaggccttggtatccttaaccttgaaaagatgggatgggcactacgcatgagatggttatggcttcaaaaaactgattttgctaggccttgggccagtttgtctattcatgtgcctcagaatgtccattctcttttcaatgtggctgtcaaaactgtggttggaaatggagaaaataccatgttttggagtgataggtggctgcaaggtaaaacagtagcagagctggcccctaatctctttgcctcgatctccaagagggcaaggaagcaatgtactgtggcgcaggctttggaaaacagaagatgggtggctgacatacatgggggactatctgttcaggtcctttatgagtacttgaccatttggtctttggtagacacaggtggttctgctacaagatgtacaagaccagcatgtttggaagctaaccgccgatgggatgtatacttgtaaatctacctatgaagcttatatttcctgggatcgatcaagtttgctccttggaaacgcatttggaagagttgggctcctcttcgctgtaagttcctctggttggccatcaataatagatgttggacagccgacaggcttgcgaagtgcagactgcagcaccccgcggccggtcccctttgtgatcaaagtgaagaatccatccaacacattttgatctcttgtgtcttttcccgccaagtgtggacacctctgttcttgaagctagggatctctggtatagtgcctcaaccttcatccgattgttttttgaggtggtggagccaatctacaaaataccggccaaaggacgtgcgaaaagggctcaactccttggttatcttagtggcttgggagatttggaagcatcgcaatgactgtgttttcaatggcactaagtcctaatgttgcgacggtcttgcaggtggtcgagaacgagggtaatctttggtgtttagcgtgggcgtctgccctccaaagtttcttagtggttcagcaaacctaggcacctaattggccggggttggccggggcgtgggtgtgtaggaaggttttggtatctcctactttttttttcctttatttttcttccccttaatgaaatgaaatgaaatgcaattctcttgcgttttcgagaaaaaaaacaaatattaacaactccatagttttcgagaatgctttggcacactaggccactatccattgacaagagagtaaactgggctgcaggtacttattcttggtgactgggtatgatatatacaatgcaaattgcaaactgggctggtggagaaacttgacaagtgtgtttttagccacatgatgtgtcatcagaaattatgggctacattaactgaccacctgggcaagaggcacacgtgaagcttgccttgtccacatcgcaaatactcagctattgcagcaaacctagcacaacccactgacttgctttgcaacttcttgtactaaattgcaccaactagcttggcaaattattggaccaaatcacacatactcagctcataaactgtcttatccaccacaacgctaaccaatttgccattaacatggaaaaataaagaggaaaaaaaacacctatcaaacaagatcaaaatgttattcagaacttagcaagagtgagtaattcataactagatacaagcgcaaaaatatctacgaagtacacatactagatatctatctatctatactttcaataaagttacaacccacttgatggaataagtcttagtctagtctttgcattccttttttgctttttccagcttttaggatgtcatagcttttcagcttttagtcggtgttagaggacagcatcctcactttctgttttagaggacagcatcttcactttctgttttagaggacaacatcttgactggatgccctagactagctgcagccagctagctactactataaatatgtatccaagaaaatagacagaaaattgccccaactctcctagtgccatcctctcaatgagagtaaagattttgctactaacaccactaactctaaagctacatgcaaacatgccacatcatcacccactagcagtaattacatatttaacttcatgcaagcatgcaacatcatctacaatctatttaattctacaaatcaacatgcaagcacatccaatcatcacccctcacatcatttccataatattttaacaaatctatctatcatttttataatatttaacatatacttatcaatatgttccacattacagcacgggtatcatttgtttatttcatgataagtactaatgaactctaatgtttcattattatttttctatttactcctagctcgattgtcgaaaaaaagtatatagaaaattgcttagtaattcctgtagcaaagcacagggaatcacctaaatggaaaagatgtacggataagtttaggatagtgagatgcataaagccttccgttactttttgctataaaaaagaaacaaaagaaagtgaatagaaactctacttttggaggggaagttggggggagggcagagtttcatttcaacaaaggtgtggcaaacattgtttcaacccagtctggtatcttaaccaataccacatcaaaacttgtgctgggtcaacctgttttgggaacctgacctactcttccaagcctagggtggattgcaactgacgaatatcccaacatctcacgatatagaaccatttcctagggaactacagtttcaccaagtaagtttattcaggaatcaggtttagttaccaagtgttcccctcgtttgtctatgcacatgttagcttttgaacttatagtgcaaaatggaggtgtaatgttcaattccttttctgtttttttgttgaatgcaaacaaaaatagaattgaagcaaatcaccttgcctccacttccaaggagctctaacattacaacctcttctggatctttcttcttcctgtccaactgaaagaaatgcatagataacaagaagtcaatgaaacaataagcattagaatgactagaacatgacaagtccagtaagaacaaactatctcatgaacaaataagatgtcaagatggcaattcaaaacaaattagaagtatacctttgcatacagcgaaagcttcgtttcaaccacagaaccattcacaagaagatccactgatcccaagctgctcagccttggagtgcttggttctgttgtactgacagggtctcctagtatgttcacttcaggaggggcctacaagaaagtggagaaataccatcagacaaactatatacaaacttcaggtcctatgttaaacattataaagtaaaggaacgcttacagaagcttgatatgttgcttggacaagcgctttcatccaattggccttctcgatttcattatggtattcaattatcagtgtgctagttgattccagcgcctgcaaatggaacaatgctcagatcaaaaagggaataaaaaacaagttatacggcaacacttcaaaagaactaagtattccttcagtagattttgtcaagacaatggtaccccaacccgagcttttgactgttaaacttccttaggtgtagcgctagctataacatggcccacctgatccaactcatcatcttcttcttgctactaaaactgatataccatggtgagaacgtcttctttgactgattttgttgtttctgcttcctcgtctccattgttggcacatggcctacttgactcataattgccaggatcagatgtgcacttctctgcacgatggtttatcaacttcttcctggcacttcagttctacattccactgctcggcactacagggatctccagatgggcgtgactcatcactgtatgacatcgttgttaaatctggcagttttagaacttgatcaagaactagtaggaagtagctattgattttaccatcttctctcgtttactagttcattggatctcattgtacccaccacccagacaagaggagagaacggacaggtcgctagacttaatcactaacattactacatactccatccgaccgaaaatataaggacttttggagttagacgcaagttaaggagaaagataaaacaaaatgaggtgagatgagaaagtaatgaaggagaaagataaaataaaatgaggtgagatgagaaagtaagtggagaaattaaatgagaaatggttgtgattagttgagatgaggaagtaggtggagaagtactccctctgtcccaaaatataacaactttgccctcaggatttgtcccaaaatataacaacttctccaccaacattctcttcccaaccaatcacaaccctccaccacacacttttcccacctacctccactactcatccaatcacaaccctccaccactcacttctacctactttcttaataaccgtgtccaaccctaaaacttcttatattctgggatggagggagtagttaaattttgggacgaaattcaaatgttaatggtagctatatttggggatggagagagtactgttctctgcgcctactttcctaccaaaggcatctccatctgctagctctttcctaggattatgtaacgatctgtttatcatctataataaaccatattgaacactttaccagcaaaagttgtccagactcttcctttatatgctacagaatttttttttttgtcattgccatcaccacactgttagaaagctgtaagagagaaaagcctttacgttttggggaaaatcccctctcattcttcttcacctagactcctacaggatccccccccccccttttgccccctgttgctgcatgctatacatccatggatgatgcaccttttcctcagaatttcgtggtgagcattacgttcgtgcattacttccatagcaagatttgcacggttgatgatatcagcccaagtataaataacgcgaccttggctatcaactacagatggttgaaattgaacccatttagattgaaagccatagtcctaatacctaaagcagtgaaccaaatctctacctagttgacattgataacaacgatctaatgaattatgagtttaatagatcctctttagcataaagatgtatatttcttactcatcacttattcccaaacctcgtatggggcaaatcgttttcatttaccatctcagggaaatcctgcctcccaaccactagcatcctactaatggtgtgttgaaacaagatgcagccttttcttctattcctcatgaaatctattgaacaattactaagcaatttggcatcaacagaattgagaagggagggggatgaagaaaacaggaggcaaatcaggaattcagcacttgtagattccataggatttcttataatttggatctgctgttttggtatcattcagggaagtaaactctccagtgagtggaattagaagaagccaaacagcacagttgaatagtataccttctgcataggcaacccaaagtaaaaataatacccggaaggttaaatggtataccttctgcatgtccacacctctagaacacacagcaatactgtaaagagacccaccaacactagttgatggaacctcaattacttgacggctagccatgctgcaacatcaaacatcaaaaaatacataaataaaaaacagagcaagcattcgcaaatgcagaaaagggaataaacttgattgtgtaccactagaagggtatgtgcttaaaattattccagtaccttcagccttttctctaaaacaggaagggagaattctacccacatctacggaaataaaatcctactatctctaatgttccaaaacttctcaaaatgacttcttacactttattagtacactaacccaaaatattcgttcattaattaaaaaaaatcaataccaacaaatgatcacatccagaaacaatgctgcatagtactatgtcaatcatagtccctaccactcatgtgcatagacatgaagttgcacatagtttagactgagaacaacagagaatttcatcattgcttcattcaacatgaagataatgatgaaaagattgcagtacatacctacaacacctttggtaatcctgggacacttcagactccaagatgtacagatacatcccagataatacaacataacttgtatgccattcagctagcgaataaccaagacccttgcatccaaaataaaatatacaaaactctgttactgtactgcataaatgcatcatatgagaagagcactcaagaaaagaaagacaaggcaataccttccaaaccaatgttctagcatcaccagctagatcagcaggataccaaggtgccaggttacaattttcacagctatcagaatcttcactatcacttcccttcaacttgcaaagtacaccaagtagttcaacaatcttgccgtatctttttggtgagaagtgaatatccagattcggcacttgaaaagaaacacgagttgatggataactcgggtgtggaactttgatcttcaagcaatcacagaataggacagtcaatacagtataacacccgtacagaataatttgcattacaatcactaaaaagttaacagcgatgcatccctaagtgtctacgtagaagtataaaacagtaacagtatgaagtgcaaggacaatttatttcatggagtttgttcccactatttcctcccttagggaaaaaaggaacaaaacattaaaaacatataaattgtttctatgacaacagcatgatgcactgctccaacaaatagttctcaattctagctttctattctttgttgaagctattagattctttgctgaaacatataaaatgttccgataacaagagcaacttaaagtatgtgtgcaagccattagatttactcagcctacaaaaatatacaattgatcccctcaactacaataaatgctagctctctcttctttgctaaagccatatatgccctccgtccgataaaaaaccaacttagtaccggatgtatatcttagtactacgaatctggagataagtccagattcatagtactaggatgtgtcacatccagtactaggttggttttttatggaatggagggagtatctcttattttcagccaatgatgactgtagtaaggtacagattgtttgataagtgttgtaattccatatgtcttagcccaaagcctaaccagataccccaagtctacattgacatgcagtttagtatgtggtgtccagatgttgaagttcaatgtatgcctccatctagtggttttagatagctatagattgtgaatagaattatagaaccaatctgaggcccgctagtccactgcaaccaccagagcaactatagcttatggtatacaatagagcatcctacaagcaaatgttacagcatatggtatgtaacagagcatcctacaagcaaaggttccaaaagaaaaaaaaaaaggatcaatgcccatgcaagggggaaatgatatgacaactcccattcttcagtaagccaaggaataactgagtatttcaaaccacaaataatcagtacttaaagacttgacaatattaaaatacttccatttatgttacctgatcaattatcactgacattccacaacgatctagaagagaacaaaactgattagcatcaacagtaggacctgacagcacacgctgattttctggtacagaatatatgtcttcagctgtatcacaaacaacaaaagcagccatatccctcccagcaatataaaaccgtgaatataaactgcgtctttcctcttcacgtgtgccgtcctataattcaatggcatggggttaggaaaagaaacagcacttgcatcaagaattcatgaggtaacttacccttgtatgcaacgtaaaatggcctaaatccagaacaaaatgttcattccccagcaaaggttgacaagtgattaaaggaatcctaacttttggtgcatccaaatcaatatcaagtccaaaactagaaacagaacaataaacagtcagccaacataaagacatcataacactgttacaagcaagttatggatattggaaatttcttaaccataacaaaataagattgcaagaaaaaataacaacttggaaaacataagaaagcaggatgaaagtaacattttgtcaaacaattaggacacgaacaagaatgcttaattattcatggcagttcatgaataagtaaagaaaactgatgtaaaaagtcttcctttcatatatgtatctcacatttaaacagatcatgcacactaaacaagagtatagaactcaaggccattaagattgagcgtagataatgagaatacatgtacctgctctgctcttccaataccatctgaagctgctcctgagctctacgtgtgacctgctctatcttcatctgcagttcaaaagatatgatcaatcattatgactatagcgtcctatatatccaaatagtaacgacgaaatatcaaacaaactgttccacaacatggtcatgagtatccaaattcgaaagtaaacttgcctgtagagcagttgctgtttccatggttactgttgggctaacagctttgctccgtttaatgaactctagaaaccgttcatagcttcccttcaaaacctaccgaaaaaacacattattatgccatgtacataaaaaaaatgcaatagcctgataaagcatgtgcattaaggaatagcgatgaaagtaattcacctccagagctttctcaaaatcctactaaaatgtgacatgaggaagtgaatttagtcctaaaagcataatgaacacaagatacaaaccgtaacatggcatggtgatatctttgccacgagctgccaatccaggtccaagccgacaggcgcacgcacaaaactgacatctagagcattactctttccctcactgacaacactctgcaaaaatagatattattccaaaacataaatgtagggatagaaggcattcatgaaatgaaaaaaaatgttgagcaatgtaacactggaaataacacttcttatttgcaacatcatagctcatgcaactgcaatggccatcagacacccaaaaataaaagcaaggagtaatacttagtaattaagtggatagccatcatctataaggtcaggtgcaacctaatttaaatgtttgatggctagccacctagaaccttgtatataataatgtaccaattgcggtttgctaattaaacaatatggttgacgaaaacttgcattcaacagataaacaatatatttcgtgctacagatgaagtggcatttttctgagtcacatcctagagtccataggaggtttgcagcaagaaattcaaacaatcgcttcatattcactgacctgagcaagagaaccttcaggagaagacaaaccacaatatctcaaagtaacatcacaccgcgtactcttgggatacaatttcgtgaccacttgaagtttctcaaatctaccacacaaaatttctgtccggtcaatattgatgatccttgcagcagcttggccaatagacacatccaccaagaatcgggttgtattcggggagactttttcaaggggggaagacagatcatcttctggttggtaactcaacagcttattaatggcctgccattcttcttttgttaatctctcctcctcatctaactgcggttctagaagggcattctcttcagaaggtaattcagccgagttccttaaacaagaaaacaagcataattatgatgtgacaaaaaatgattcatatgcactcatgaaactatccattgttcacaaaataaatactagtaataaattactcccaacaagttaacaatggccacattgatcatctatacaatttgctcgttataatgtcactaaaccgaaagatatatgtgaaatcacactcaatgaaagaaatgatttggttgaagttatatatgaaatgaaaagctgctttctgagcaacttataactgtcctaaaaacaaaattgtctttggcaacatgtcaataaagtactttcctttcatgtatgtacccatcgattgcctaaattcaggggagcaataagcaggcactttaattaaattagtatttttaagttttgtgtaaatatcgctactattataaaaattgataacgcttttgcatgttttttcgtctgtcacctctgtgatcgagtcggtctcataccccgcacgctcgcataaagatgggcactctctacacatcctcccgtacgtaagacggagcctctcgctcctccctcaaccggcatggccaggtgaccttcagcccatcatcaccaactgagcttgcacctctagctaggccactgccctggccagtcgtgccccactggcctgatgggcctgctgcccaaaaccatgcagctttgaccacttatgtgtgtgaagcgacaaaaggtttccacggaaacagtaacccgaccggtacccctaggtgaaacgctatcctcttataatttcagttggatctcttctcttctcttttcattttcgatagttttctctttgtgatttttggcacctgtacttatcgacttgcgtacccatcacattaatccttccatccagtgcttgtgtgccatgccttggcttctcattcagcataatccttacccaaaccattaatcaagattgacttcaaacctctaatatcagtagacgaaataaccatctaactaatagattttccgtgacccaaccatgtacacactaataaattaaccaacacaagccatcacacactactacaaaaaagaattgtgtttcataactaaacatgtacaaacaacgctaatttcccttcacaattcatcaaccatacacactaattttccttttacatgtagcatttgttaccctaagtatatgagaaattattgatgattagaattttaaaaagttgaccaaatcatatcataaaacatcaaatatttacgactggattgagtaattttgttcagttattttaaaattgtctttgcccattgcaacacatggatattttgctagtaccttataaaattagtataccgttggggcctcccctactgtttcaaggttaagaaaaaaggtatttttagtagcaaggctgcttcacaccattgttattctgcaacctgcagtaaactaatggcccaaaaaaaagcagtaacagcaaaaattaggcacgagaaacgcccaggggtcttccggctagctcgacaaggtggtgggctagacgacctaggttcgaagcctcaccccttctaattatttgatattaggtccttccctaatattcgcgtcttttttgcaaacattaggcacactatgcagtatcactaaccaacaagtagcaggtgttgcaatgggccctagattccagcaggccaataagccaaagatatacgattggcttgtaggtaaaaatgcacagataaccatataataggagataaatgtactgctatacacacacctaaaagcaggtataaggattgcctacatatagttgcttattactgtattgttgcaaaggaactttggaacctgcaacttgaaactaacagggaaaaagaactaatggttgctagaatgagtaaaaacttcatttgatcacgtattgttacttttatcctcctccaaatttaactaagtgatgctcccatgtgcaatgcttaatgaaaaagttggcaagcattggcatacaagtttcattagtcctaccatctacaaactaaaccatttaagttgcacagaagttaccaacaagattgggaacctaagttaaaaagaatatctttctgcctatttctatgagtacacctcaaaggagcaatagtacagaaaaatgagaatagctgccacaatgaacataatatagaatggtaccataaaaaaattagtatcttaaaaatagacagaagcaatgaacaataaaggtacagatattattatcaacttattggacaaaccatccaaaagtccaccatcttctctttgatgcccccttcttatgtaatatttcctttgatttcacggtctcaactttagcatgtcccaacaacctgaaagtatttaattatagcaataccataaccagatgaatggtgacccaaatgaaagcaaaaggttacaaaagatacatgtacatgttctgtaccgcacctccaaagtattatgacttttgtgtccagaattttctctatctgccgaatttcggacatatcaacattagatgcttgttgcaataatgtggcatacaagtgaacatagcgtcgacgaagctggcagagatgcctagttctctcccatgagaaccaatagctgaaaaaagaataaacaaatttcataaggaagaaatcctaatttgtaaagaaagatgacagcatatataattttttgcatcaaaatatctacacaattcaagtaattgcctccaagatgcaagaaaaatgcaacacacagtccatgatgatataatcacacatgattttgtcaaaaattgatcaatgtagcgccatgaaaagaaaaaaataacagttgacagactgattgtagcaaatgttctcaggtgatgctaagagcctaaagtgtagcttgcaacataatcccaatccatccttacaagggccaattcgcctggttgacggaaccaattctgttagacagaacatagtaattgggttcgactggcatttagaaagaaaaaagtcaaaaaaccacacctccactttttataccactaaaaacccaaggccaccaagggtaataacatggaatgcaaacctcctacgcagctacgctccccccgagttccttgtaccacttgtgctgtacgttgttgtaactccatgctgtcctttaaatgcactaccccacagacatgggttgcttcacatgctgtatcaactaccatcaatgcaaattccatgtgccaatgagctgaccatggcaatgggtttgtcagggaactgatgatctgtggattagcacagattcttcacggaatgtaaatgttttacatccattagaatgacatgatgcacaaatgttccttcacccacctacgcatacctggggcccaccaacagcaagcttcacctgctgccagcctgccaccaagtacgagtggcactggcaattagcatactgctataaagatagccacctagctctcccaggcaacaatacttaggcgctaggcatcagtcatctttgaagccaatgtccagttactatcactaagtagccatcaagcttaaataggcattaagcaccatccagctgaagtagggggggaggggcaaaaatcagccacaaccaagcttacttggaacctgatcaatgggattgaggggcaaaggccatggatgattgaaaaggagggtcaaagtgggtagtgcagtagtgttcttcaggatgctatactagttcaagcagggacataactccagtaaatctggggaagatgttaagttcacggtcaataattacttaattagatgagttctaagctcctgagcagagataggctagttattcagttagatgaattatgtttgttcctcgagtaattaggtagaaggtgtttggctagttcagctaggttagctgattagttagttcagacagtgttagcctaagagtccaagtcagcatgttgcctaatcattcaacttttgggccaagttattgtggatgatgtgtttggacaattatggagaattaatcctgcgtcaagaatgccagcaagaaccagaacatcattatctccctcctcattcctgcacatggcttatggcaagtcgagcacattctattgccgctcgttttttgttctaatctttccagagtttaacaggaagctgaatttcgaataagatcaataccataattttttctgtcgcagaccagccagcacagcataacgccaccaagcacggcaatccactttaactggcacaataggccgtaaatgggacacgtcaacacgtgtcctgaaccttgaaaatgtttccaacagtttaatgccatcataatactgggcctggtgcaatagtgtaaagagagtaagcacttggtcaatttcacaatttaactgatggagaaggcacaattccaaggtacctcagtaacagttagtgaaacatcactaagaacaagtgatgctttctctaaagggatatctggaccccctctctcctgctttccaagtcgtttgtagttaagagttccatttatagggtaaactaaatagttcctattcattgcccaaacagaattgccagaatgatcatcaatgccatcttgaaatatctgtgggagatcattctaggataagaagcagcgaacaggtactgaagaatgaagttgttatgaaagacaaatatataacctcgccccattcagtaggatttagatcttcccatttcttagcaagcttccacgcgctgctgtcagaatcatggtagatggctagcctatgcagttcgaccgactaaataagggccaaaaaagaacataaatgcattggttataaataaagataataataataataaagcaaaagcagatgatcagatggggaataaactaaaagaatatcggagtttatgaaccaattgattattaatattgtgtttgtgaacttgtgatataatctgtccaaacaagctcaaaaaatggcaaaaggccaacaatagcttcacaagtatcacataagcaagcattcagaagaaaagaaaaaggtccaagagcacaataacaatgataaacaaaacataaacctggtgaaaggccaaccaaatttagttccaatgtacaccatatcgctgtagaaccatggtatataaggaggtattacagaattttactcaagtcttgatgaacattatctaacccttattttaatttgatcaatcagcgcttgaattttgacaccaccatgttcatgttagattccctatatattccctcaatcttaataacatttgggacctccttcggtcatcccggcaaaaaagatgccctatataaaaccatgcagaagggcagaaaatggtcgaatgtctcaggatcagtaacaagctaggcataacagagctggagtttaagttgaagttggaaccaagaaaaagagaatggcaatatgttggaacttataatgatatatggctcttaatagttctactagtagcatttacgcatgatgatccactgatccacctcagttttgttactaatttatcacatgatgatggactacagcagcgcaaccttaatactgggatcatattaaaaccctcggtggctcaaagggagcagattatgcattgagatgttacatttcttcgctatttttttgacaaggctttcttccctgatttctcatagttgtagctacgatttgccaattccaccattattttttccactcaagttctttcacttagatctagaaaatcaattcaatacattcacttgcagctttgatcattagaattaattgcaatatattctagtaaatacaatattatagggttagttttaactaaatatttgtgtgcagttctgtactggtggttgaaagtcaaaaggtgcacgggttctaaaccatactccctccatactcataaaggaagtcgtttaggacagcgacacggtctccaaaacacaactttgacttcttgtttctataaaaatatttattgaaaagtgatatatatatacttttatgaaagtatttttcaagacaaatctattcatataatttttacattttcaaactcaacaacttgagagttatttatgatttatattcccaaggtttgacttaaacattgtcctaaacgacttcctttatgagtacggagggagtaccaatttagggacagaggagcatttatctcaaagtctaaataacaattgtatgctgatcatatgctatggccaggtaaccaagaggcaatctacatacctttgcataggagatgagatgcctatcgaggcaggttaaaaaataacagaacatacagttaaatgttacataaatttgttctcaccttccgcagcttatctaatgctacaccagcatcaaatgtctcgttaccgtcttcgtcgactgtaacggctgcaagtcttgacaacgtgaagccagatgcaaatggatgcccagaattgctggtagaaaaacaaagaataaatttacggaagacattgggataaaagaaagactaaaaaagtgtgcaaatgacttagcatacctgacagaatcttcatatctgatatgcacgttgctgatggtgactttaaggtttccaataattgttgatattaaattgtatagccatgaattactccctggtacctgcagcatccaacaagcactatcaaaaaacaagcaacaaaaatgtgtgtaatccatattaaacaatcgaacagacaaataagagaaatgacagaaaccataataggtattaaaaacagtaatggacatccagaaacaccaaaacccaacttgaactttcacagctaaccttttagaactattgacctacaaagtttaagacaaagtgcatgttcagatgctataatactttaaacctgtactatatgataaaacttagtgtcatggagtcaaaggataatccaaaaaaaaaaagttgtttttttcccatcatcacagttagagctacagacagaacaataacttcaaatggacaaatatccccaggaccacaattttgttttccactaaaacagcatgctttcatggaatcgactataatcaagtcatcaattagtcattaatgtgtagtcacccgctggcagacaaatagcaccataaccacaacttcaagtaagtcaggacaatggactaaaagtaacaggctagcttcagctggacaggagaatcgctgccttggcatgcaagagcagccagatagagtgacaacaaaggagcaagatcaaattcgaattgtcttcacaaaattatcctcccgggtaacactatttatttgttttaagttatgacaaaaagaaattgagataaacaataaattcttccatcaaatcattaggaaggcaagcaatgaacaggaaatattcttacatcaaaggtataggtacttcaatatttatcaaatttaaaaatacaacctaaataaaaaacacgtctgagctagaatatttagccattaatgaatgaatgaatgaatgaatgaatgaatagggaaattggaaagaattggcacacggtcaattaacaggagagctccagcaatattgtttatgaaaaaagaaattaatatcaaaggccatcaacctgaccatacactcgaatgtaatattacaacttcaagaagaaacatgatatccatctatgggcacctaaaattgctctaatattgtgcctcaagaagtttgtttttatatgattatgattgcacttgttgacatcatcttttactcttataaaatgaggtgaggtgatggtgtattcaacatgtcactgatatatgtagcatgactttcatgtttgcatgctcttttgtaatatttgtattctttgcaagtgcatatatattcactgattgattcagcatatgttttgcattttgatcttcagactatagggcacttttttttggcatccattacaatggggaagtatgatgtaatttccaaatgtcataactgttcacaactatcagagtattgcttgccagaatatcgaaatagaatactagaattaagctttgtgagagaaacaggagaaaaaaatcatacaggtcctcctttcgagctcctacttgttgcttcaagagttgctgcctctgcagcctgcggataagaccattagagcttgagctttgcataaagatgatcgtgagcattatctttgaggggaagcagagaaataaaataggtgaagcagaagataaaagcaagaaaacaataaaagtaaaaatctggttcataaagctataattccatataatgattgctaaagcatataatgcaaatatgtggaacagtttcaactctcgtatgattgcattacagatcactatgaaacatttgactcttggaggtcagctctcacctcagtcccatctgacctaaattaacctaaatgatacacactcgtcacttgaatgtaccacacattgcatgactacttttacaaacactattgtattgtaccagctcctggaagccaataaaattgcaatttctcacttgcaaattgtgcataaaaagttcagtgctccatgtttaattttttttcctcgaacatgcaggagagctgtgtatcattgtatcaaaagaagaaaccaggatataaagccttataaaacccgccacacacaccacactgagactgttgaagttgcatccgtacccgagactaacaagcaccagacaaccttggccaacatttctgctttgcaaatgccgtataatatatgttaattaaagaataaattgagccataggtacaacagatcgtgctgtgggtgcacataggccatataatttgatgtttgctccccttagtcacctttcttgttttaagcggagcattcagcacaaaatattaccctgtgacaatgaaacgcacaagtagcattgactcacccatctctttatgtgtcccgctctcagattcaccctcctttctctttgttttctctctatcccgatattgaaaataaatgtgatattatgtttttacctttctgttctgcaaatacatatgcacagttgatgcttatgaccttaagttaccatgaccatgaatgattacaaggcagcacaatgcatgtttcggccatgtgttaggtttttattaccctagtgtgcaccacctaagcaagctcagtgattcaaatgagcaattctcaagcgttgcagcctgcatgcactcaccacccacaagtagtattataactgcattttactcgatacaagtgctatgtttcatatacagtgaatagtcaacacatagtcttgtacgcacttcttgtttccttctgttcaaataaattcggagatagctatattttgtaaagaaaaggtttataaatgtacttgaaaggagtttggaggaagctgcataacctggtttgtggtcaagcggaaccaagtttaaaataggtgatctgaccacccaactaacatctaacatgatctcacaagtcacaacaaaagaatgaacagaaaacaaatattatacattaagcacctaacaaataaacaatatcatggtgaaaatattgctctgctacatcaattaggcatgttgatttcatcaggtggtcaaatacataaaaaaaggaggtacactaccaagtacaagtgcctacaaaacatacattatgatgaatacccattccttacaagaacacattcaatttaaggttatttaacttatttcaaattaaccaaattgtctcgaatggaaaaataacaaaaaatcagagttttagttccatcataccaacctattgaagtagagcctaaagtaattaaaaaatgccccacatataattgtatttcattattatggtgatcaaatattcctacagtggtactgtcaaaaataaatacttccaaaactatacttctgaacctactagtctacaagagaccttatgaaatggagcaattaaaaccaacaaacattttcctcggatatggagaactttcagaggtattgacttcttgttaacaacatatagtctcaaatttaactaataatagatagttctattgactgttcaaacaagggggtaaaaaactcatgagagaagttgcaaacaaacctcaatctgctgaagttttgcttcaaaaagtttctctctatcttcttcctaacacaaaaatgtgaaaaatattaagaataagggacaaagaatgacatgcatagaatagaaatggcatcaccaataacacaataccaaattatagttacataccttcagagtctgtccatcaggggcaggatgagcaagaacaaacagacgatcaataagaacaataactggctctttacccaagcttttccatggaacctattaaaaatcaatattttttgtgtgtgaacaattaacaggtacaagataaacaaatacagtagcaaacttgatattataagctgcaggcagcaaaatcatgttcagcaattcaaccacaggatgttatcatttgctatcctgccaaaccaaaaacatacaacacaactatttgtttccgttttaaaatgcttcccaatgtacccattagatgaaaagaatgtaactgtacattcatcaataaagctagttgctgatggttccttttatgaatccttaaataaagttttactaaggtttgaggcccatttcaactgtataacacaagaagtgattgactatgtaaggttgctgctgtgaatgatttggtttgctggccaatctgaaacttgaatgttcatggaatcctctatctgtgcttcctccctaggaagcctcaaaatttactgccgtgtcctttgttctcactgtttggtactttctatcaatgaggttctttgctgtggagctgttgccagagagaaaaatgagcgctgcttcattagaaccaagaagctaggggttaagttgtctgtgcgcatattcacatatacctcattttgatgcttcctgatgtttagttaaagcaacataggaaattatttgcggctatgtttagttaaattgcatgattctagtattctgctagtttttccatgtcagaaaacttagggcaacataagtcaggctcagaaaacagaaaataacaagtacctttaaagttatggtgccaacaaacccagctttcactgttactggaagccgaagagaattcagtgcatcagccttcaattttaggtctttaagaacaacgtcacctttcaacagaattaagaggggtaaataatgcatcggacacatacagcaacaaagctttagagtaaaagcacagtgaactcatgagttttcctacataaaggaaaaatccagtaatccagtgtatagttgtttagttaaaacacatatacttgaaaactagagaatataaaaagaatatcaccaaatgtgacattgtaagagagctatgggttatgcatggtgatgcagggtacatgatgcatgggatcacagacgatgtgctactgccacgaggcatgtaatgatttctgttgccaccaaaacaaattttgacatgccaaaccattgaacagtggcctcaccgcgtcacgaaggactgtgcaccttatcccaaggcaagctacactaggctgcaacacagagaactgggcacagatgtcgctgttaatggtctgctacactgtttcagaatgcaatgagcaacatcacactaaggcatacattagtgaaccacaccaagatgccaagagttctgccaggtcatttcatggtaaaacattgttgttggcagtgtttcaacagcaaaatgatctcttcatcagcaaggcttcctggaagcacctccacaaaattgtttttcatgtgaactgactggcaattcctatttagaatcaataacaaaacaacaacatcgacttttggtcccaagaaggttttgggttagtcgagagatgaaacctaccacacgaacaaaaaggaaaaatagtgctaaaaataataaaagatatcactattagaaatcaaattatccaacaattaccaacctccatgtcattgtggcataaccagaactacagtctactgcacatatatatataaatatcacattctacaatcttagttaacagatatcatttggatttgggtggtaactattgattcttaagaaaggtacactggcactgcaccattcagatcaagtattttgcttctcctatgacatcctacaacccaatgtcaattatctacaatctacatttccctgtaaattaatcttcaataagcacaacagatgcaccttgaataagattgagaatttatatttttgtcttaagaggacaagaataaagagttggattcaatccaaaacacaacacaaaagtattgatagcctatcccggtcaggtatgttactggtcttacaccatcctacatcaacccgatgtcaaataatgcaatagtccttattccatagattaactacgaataagcataatggttagtgcccattgagaataaatcttctggttgcaagaagaaaagtatgaagagtcacatccaattcttggcacgacagaagtactttttaacactgtagactaactaacataagaattgtatattataaggtggtaatggtggagatgggagaaaaaagaaagaaacaaaccttgccaaacacttatccggagtgtttcaacagagagcccttcaacatattcgcccaaatacttgcgaagcaaatacagcacctacagttaaaaatgttgaattttataactatgcaaaatcaaaatactatctatgtacagttgcactcttttagactccacatagttgtgggaaatctcagatgaaacagatgggtgacctgaaattcatccgtgataaattctatacagtgtcatcaccccacccccaccccccccccatcccccaaattaaaaaaaaaacacattacacatacacaacaacaaccaccacctacagtctgcagatcacattctatctctaattaccggtgcatgtcgcaatggtctgctttgaacaaatgaggatcatgataagaggtggttgtacatttcactctttcttatgagcaacttgtacctgtggcggcgttccgtagataatagtatacttatgtgaaagtaaagaactaaagatcgaaaaattagaaatgcgatgttaccacatgacctattatcagccatgcacactattacatcaagcaactggagaagcttctcaaacaactaaaatgatcaagattaatgcagcagttaccctgctgtttgactaaacaattacatatgagacgctgctagctgatgtttatcaatactcactaatatgtagatctcaactttctagtatggaaatggcattcatatgagtacacgataaaatgtaatgacaggtcacaccagcttaggaatcaacatgatgagtacaggataaatgtaatgataggtcataccagcttaggaatcaacatgaactggaaacttaaagtaaataagatgcagtgcagacatgatctctctcatttccttctatagcttcagcagcaactagcaaaggctaaatgtaacaactatgtgcgaaaattcctagcaattagaagcaagggaaactaggaaatgtgtatttaaaggaaagaaaagagaagtgtagtcgccaactctatcttcagtttctttcaacaataaataaacattcaacccatgaactgatcaagacccccctcgaaatgccccgtggttccacaccaatcgcacacagcgcgttccaactctcccgaaccggtcgcgtgatcgccactaaacctaccagtacgcctcggcaatcacccccccccctcacacacacgcacacatcgacaccgaaaccctgacaagtggcacctacacccccgcccgccgctcgatcaaacgcgaccacccaccctagcgccctactcgaagccaccacagaaatgagagcgagcgagagagggagagatcgtacgtggccctcgaacatggcgaaggcggagggggggcgacgggacgggcccggcgcggggggggcggtggtggtggaggagcggcgcgctctagggcgacgacgacgccgccgcgcgcgcgaatccgctgcctgcgcgatccctcaggggcgccgtcatggacggggtcgagtccgaggtggcgaggggagaagcgagaggcccccgtgccctggttggcgaggaagacgacgaggaggcgaggcgagagagggggaatgggagggaggaggcggaggggccgggtcgacgggacgggagagagaggaggatgtgggggccggcggggcggtgaggtgagaggagaggggtggtgtggtgggggcgtgtgggtcggagtcgagtcggtccgcgcgcgcgcgcgcgggggggggggggggcagcttccgcaacagcgtaacgggcgccacgattcggcctggtcaacacgtggagagaggagcggagacgaggaggggggccagggggggagatgccgctttctttggaacgcacgactggtgccaacgggcgatttttttcccgttgctcttttttcgttccttctttttggagtatctagtctagctttttggttaaggaaagggtacaactgtattagaaattgacttggagcagctttgtgtaggagtaataacgagtacattcacaaattgacttaggccctctcgatttggagagatattttcaacgcacacaaaacaaaaaaactaattattatatgattaattaagtattaactattataaaattaaaaatagatttgtttgaatttttaaaacaatttctacatagaaactttttgttaaaaacatagtatttaacggtttgaaaaacgtgctaatggaaagtaagaaagtggaagtttagagttgagaaaaagaaccaggccttagagcagctttgcgtactaataactaaaatacaaatttgaacttttaagaaaaaacatgcatggatgtcatgttgtttgaattgacaatttatcgagccaagtggagcaagaaagctttatccacatctctaatttagatcgagtttcgcctagcaaaaaggatacaccatacagttgtttgcttgtttgcatctgtttagcttggttagcaatagattttgcatggttgattgtatgaaagatatggtttggcggagatttgtttaatcagttaaattcctaccatctaggtaagctaaacccttttctacggcaatattctcatcattaaactcaccatatcagcatttttaaaacaatttatcacttgagttaatgtatgataaattaattacaggcttgagaaaggaggggaaaaaaataaaaccacccttgcactcctcaatcctcattgatggagatcaccactcaccgtagtcgtaatagtccggttcctcgctcacttgtaggattcgcgatggatgaagctcatggaagtggcaaggagagaagccttggaggctatgcaaagttatcttggagacgagtgtagtgtgaacaatgtaggtgcgtaagccaaggcagattgggacctcaccaaagaggttgttgtcatgaatcacatatgagatcactgtcgcgtacaccacatgtgttggggatcggtatgtctcattatccctttccatcccttcaccaattaaatatagaaattaattgatgctagggcaagggtatataatatgtacggaaggggattaaaaacacaatttttctaagcaataataaatataaaagtaggcatttgatcccctaattggcaaaaaccatatagggaagttttactttccttctcaagttccgatggaggagacaagaaaataaaggtggaagaagaggtgataccaatgagggattgcggaggtggaggaaacaataatgaggttatagggttaggcctaccttatatatagtaggggatggtaagatcggagttgtcgatttctaatacaagtgtaatacccaacaaattagttttgttagtgtattctactcaggcccatgtgtgcatgttctggttcatgtgtggcctaggtattattgtgtggtaggattagtcccatatagagacattagacacgtttaaatcaacttataaacccgcatgttcaaaccgcaatatgtagcatagaagataacccttttttatatgaagcaaggacacaagtgtgcgtggggtgctacgtgtatggaagaatgatggaaatgttttagacactagtgtacattttacaatattctatgaggctgtgtacaacatatacatttgctgcaagtataaattaacatgctatggagtggaagaataaaacattactctcacgtgcatatgtcaatcccatgaaaataatatattaatatattagaacatatcaatatttagatggtgaaggagagtgatacacatagctctatctctatgcatttcgtcttttacggcacaaggtcaccatcaatagatatgtttatgtcttaactcatataaagtccaggaataacctatttgccaactcatgaaatgaggttagtcccacaaggccggtttgtcacaaatcaacaaaacaacaattgaaaaaataattgttgatcatagatctttcaatctattcctgaaacatacagaattgagtgggaaatgtagaatgagctcccttcaaagatgttcatatctctactatgataaaaattgaaaatgtttttttccggtactttggtacatcatccgtgtatgagttgatttttaatttcgttcgtttttggaaatacatatcagtatttgagtcgtttttaacttcttttgtttttggaaatacagaaaagactcctaattgcatctcatgattttcttaaaaaaatatttacccaagcgaattcctatagtaaattttatcttaactaaaccatataacaataataaaattaaaatagccttcacccattgcaatacacgggtattttttctagtataattataaagagagacatatgcacatatatgataaaagataatgaaaggagtttatgctatattttgtgaggtcttttacggtgcttggaaggtacctgagatacctccttaaccaattgatatccaccgttaatttataaagggtaatttaggaacaaaagtttttattaacaagggtagcttagtaattgtttaatccccaattacccatccagtgcctgacattcaagatttccttttcaatattaaccctaatcaatcccaatccaatgaggcagtgcgtgcgacagcggcgaccggctggcgcatggtgtggctgtgatcagtgggcacggcgggcgcgcgcggcagcggtgatgccgaccggctgccgcgtacgtaaactgcaaccagcgggcgctacgggcgcgtgcggcggcggcggcggtttcatacgctgcgaccgccggagggcgcgtatgatggcagcaacctcggtgagcggcgggcgcgtgcggcctcggcgagcagcggacttgtatggctgcgacgaccagcaggtgtgccaatttgttgcggatgagttcctctcgttttaatcttcctcctctgatgcttaaatttagtttctcacaaaacgtttgtagcttctctgaaaagttctgaattttttaagagtacacaacacaattcctgatcattgtgagcactgagcaggtacttcatgtagtttgttgtgatacccaccagttcaaatttcatgtttgcaagtttattctcaaataatggttctagagttacaaatctctataaaaacgtatatgtactagtgcaatgaagtatttttgtgatatttagcataggtgccctatgaagtctacaccctggttggaaccgattgaaggcatttggtttatttggttgtgacataatctattatagagtgaagtgcatggacggtccttaaacttgtctaggtgtgtcatatagatccccaaactctcaaaacgcatttttaggaccttcaacttgtttcgggtgtcatcactagtccaaacgggtttaatccgcccccacgcgccaacgtggcatgccatggtggattatcagtggttccacacgagagggtagggaccaactgacaggtggggcctactaaaagaatcattttctttttcttctcctcccttccttctcgctgccaatgagatcccatggccactggtgagttggccgtcgtacctgtgtcgcgtcggccgtccgggcggaccacgaagtggccgagcgacggcgtgccgctgccggcgatgcgatggatagcatctgccccgacgaggtcgggttccatccggatgacccgtctatgagcatgatgtcccaggcgacgtcgtagagctcgttggggaggtcgttgatgcccgcgcgcgctcctccctcgtccgccttggtcttcttccagccgaggagcaaccgcgatccaggccgccgccgtctccacctccatccaggccgccaccgctcctcctctgttccttcccatcgtcagcatcgccccgtggcagcacccttcctgtgccaccgctccccatctgctccatctcccccaccgtcgccgcctcgcgcggccacactggccctgtgtgttcaccgccgctcaaccatcgcctcggccgcgctgccacgccactataatctcggccgcgccgacgtcgcccgatcgccgcgcctcccattccattgccaccactgcctttcccgcgccgtcgcgcgccagctgtctcccactcgggtgcgcgcacatgtgagaggggaacaagatagcatagcaaaaaggagaggaggaattgagaacgaagaggaaagaataaggaggagagagagataccgacatgtgggacccacatggccccaccgacacataggcgccaccatggcatgccacgtcagtgaatggagcgggtcggagcccgtttggacctatataacacccaagacaagttcgggaacccaaaaatacattttgagagttcagggacctagatgacacatccgcacaagtttagggaccgctggtgcacttcactctctgttatatatctattacttagctgtgagtgataattccgttagcttagttgtattttgatataataacatatttctattaaatacttgcttaattgtgaactttgttttagattcagatgactaacttagcctcctcccttagacagtaatacaattttacttgggtctgttagtttggaatgtataaaaataaatgtgaaatacattagttaggtactaactgagatgtagatgcaaattagttgaggtagattttaaattaccttgtaaataagtgtatggccatatgatatattttatgaattaattacatgttttgcagaacaatatggttgttgtaaggtatagtgcggaggctctatcagcttaccaacatgtcatcacccagacatttggtagcaaggaagaaatcgttgatttttacaacaattatgctcgtggaaaaggttttagcaccagaaaatgctacttggaaagaattaaaggcacgaagcaggtgtgcctaagaaagttggtgtgcagtcgacaaggtttccgtgaaggtaagcatatgaagagaacgggtagaaaaggaagagctcgaaacctgacttgtttgtgggtgtgaagcaaaactagtcatcggagtagttaaagaagagggcgatctgctttcaccacagcgtttcgtgcgttttacgatcggcgtgtttgtttctgcgtctatccacgtcgcctttttttgggtttgaccccccgcgcgcgtccgggcgctgtgctaccagaggtggaggccctttgaatattggcgtgtcgtgttttcctacaccggtttgtctgactggtgggactgtcattttggtggggaagttctatgtgtgatgggtggttgaggccctgtgaaaaatttctgtgtgatgggtggtcgagaccctgtgaaaaccggctgggtgcttctcattgtttccatcggtccacatcggagtagttaaatttttttgatccatgtgcagcgttcatggtggaccaggtagttgcctgtttcttctcctgctggtctaccgtggagagagaccaccatgggcacattacgcttccctaggactgatgtgttgctgcagtgagagatttccttctgctcgagtgaagattgccattggctttgtggacatggtccattctacgagcgtgtggtgggctgggaaaaatagaagcccgtccatgcgctgggagcacgcttggctgggcttgtccgtgcgtacgggacagccaacggtggttcgatagcgtctcccacaattccccgtaacggtctgtgagcagctgtgcttcactgtgtcttcatcaatgccgcccaactgccccctcccatttctgcttccccggtttcgttttctttccttggaagcttcgctgccgtgctctcctttcttcccaattgttttcactttgttgccgtccatggagaccgcgaggtgaaatacggccaattttttcttcatttgaaggatctccttctccctgcttactggatggctacctgttgtaggaacactttcgttgtttgcgccgtcgccgtcgtgggtgtctaggagacgaaggtattctccgtttcgaccccggcgacctaatccttccattcttgctgttccaaggagttctttgtgccgtcaagccgccctctggttcttccatccgtcgtcttcaggcctccccttttgaaggtgattccttgctacggttttacatcctttactcgctttatggtctccgcttccgttatgtgtgcatttatgttgtgtccattggggagaagagagtgggtagttgggacggacgtcgacggtcaacgttcctcttttttccttttgttgtccacaggccagagcatgtatgctatggctgtccctgggctttatctggtctcctctttcttacgccttgcctacacttcacacacgctccttctgtagttcattggcttgctttgtctattttttgagtagtctctctgcgattcgcagtgccaggcgggatggtcgcggttggggtttccttcgtttcgttgttgaacgcggccgcttgccattgtcgtcttcccttggtgtcgtacctttgggagctggatggcgatggtgtcttgctagctggtgtagagcttgctttgccagtcgaggcgcccagttgcaatacagtaagcaagtttttttgggtgcctgcagcagagcctcttactgtttctcatgaaatggctgctcagcaagctgttcgtttcctacaagctaagtacggttttgcagtgcacgactacaactttgaaatgttgctctcctataggaggatagcgtcatctactgtagacgcggctatcacggctgctgcgtgtcttgctagttatgcttaaccaggaaacagggcggtggttcgtgaaagattttatggatgaacacaaccattgtttagcacatgttgatcaagtttgttttctacgttcacaccgtaaaatcagtgatgcacagaaggcagatatccttgaaatggaaatagcaggagtgcgaaaacaccaaaatatgaatataatggaaaaacaatttggtggttatggcaatgttggatttgtatcaagggatatatataagcaagaaaccatagttgatggtgatgctcaaacggtgttgagtcacctaagggcacacaggagagggatcatgatttctttttcatgtatgagatagataagcaaggccatttgaaacatttgttctggtcagattcacagtctcgtctggactatgatgcgtttggtgaagttgtggtattcgacagcacatacaggacaaacaaatataacttaccattttgtaccgtttgttggattgaaccaccatagaagcactgccatatttggatgtggcattgtttctgatgaatcaggagaagcatatgactggttgttgaccacctttttcacttgtatggctcagaaatatcccatatctgttatcactgatggagatcttgcaatgcaaagagcatttagaaaattattatatgattactgttcagcacatgagtttgagagcaaatggatccattttagggaaaagcatgaaattaccagcggtgatacttgttgcatcaaatgtatgagatgaggatgttacgtgctacaacatatcaagaaggactatgttatttaggcttgaagagtaaccaacgaagcgagagtttgagctcaacattacatactcatcttgatgggcagatgacataattccgcatgatgcatcattataaggaatgcttatccaatttacggcgaaatgaggcgaagctagatagtgaggcatcccaatctgtgccattcacggagttggatgcttctaacattgagaaagatgcagcacatgtgtatacacctactgtttttgcattggtgaaagaagagatatgtggtgcaaggaagcttacgatcaatgaaatactagatagaggagatttgacgatatatgtgatatgtctgagggaaagaagagagcggaagtttcatgttgattgttcattttcagagacctcgttggaaagaatttcttgctcctgttgtaaactgcaatgctaagccacaccatgtagtcacatattttatgtgtcccaggggttgccgttgcattgctaaacggtggactatgagtgcgaagtctgctttcccatccataagaaagagtagcatgtatgattggtaaaaaagcctagagaggtaccgtgatttacgcaatttgagcaattcagcatgtttcaaagcttctgaatcaaaagatttgtatgacaagatgaagcatgcattgcggaaagtaattacggaaagcagtgcatctaatgttaaaaggaagtctaataggcatgggcctataataccacaaagcttgcaagctgaaccattcatggaggcaaaggttcaagatccggttaaaattgctcctagatgtgctcctagaaaccatacaagaggatcaaggattaaggcctttcctgcaaaaagcctaaccacacaagacgaacatgtccagagcgaacaacttaattaggtagatttactaattatagttcatggagtaaactatgtttcggttttaggacattttcatgcgcttgatttcataagtctagtgtatggtgagttggtgattttgtgttagctctgaatctgtactttggtaacacaggtttcagtacgagtgaccttgcttttttagaaaaaaatgaacttgtgcatggagtaatagatgttgttttaggttcagatacctcttgcactgaagtcatagcatagtttcagaatcttaattttatatgtgtattatatggtgactttatgttagatctggattttttgctttgctaacataggttcagtttctgtgattttgcactgaaaaaaaacttacagcgtgttattattcgctttcaggatccttgcactgatttataatgcatggagcactacaagatccaaaagacagtattctcacttggcatatgaatatcttgggcccatcatagggccgtcagaccttattggagcatcatttatattattttcatattgctagtacaaacatgttattttttgcttttgtcagtactacttggaactcctatatttaccaagtgaatgttacatgttattatttgtgaatcgatctgcacaatgatattcctcctgtgtaatttcgtcttgtaatattctatgttttgccaattatacaacggttctaacgcatcaaataaaagttatattcataccatgtcatcgggagctaattgtgctggtggttgattagtgaatatttgaagacagccaccagggatcgtttcccacttccatctctttttggccatttattattatccctaagaatgggcttcaaaacaatccagtggcccaagttgtgcgaatgagttggccggtttggtttgtgcttgtgagaccgttttactagaattttcaccttttcgtttctcaaaatttctctgatgtaccgactacaaaagcacacgaaaattcaatatttttttttaaaaaaattctgaacaagtattgaaaatatcacattatttatataaaatttccaatgattttaaatttggttgaaatttaatatgtcagaaatatctcgatttaatagtcaactatttgccaaatttgatttatgaattcatgattgtagtttttaattttgtacatgcctaattcaaatatgtttaataacatcctatcactttttttttaaaaaaaagctatatttcggcttcacaatctgcctagaacaggcttgttattttttttctcatatgtgttcgaaaaaaactatagccgcctcaaagatccatgctcatgatgatgatgtatatgcgattgcatgcactaaagatccaggcctcatcagttgccatataatgtatgtgccgataacaaattttgaatcttaaaacacaatatatatgcaaatacatgagtccatagtcgcttgaaagacccatagctcatgatttcatagtttcttctttaacattggcatatgagttatgaaaacatatatatgttaaagttttaattatattttttttatcgcatgtatgcctttttcatattatcagcaattggccaactgatggtcatacgcgaaactttggtcgatatacctctttttatgaagtaactaatgcgtactgctatgagtatgttttccaaagaagaaggcgtattacctaaacattgcccaattgtagtgcgtggaccagttatggcccagatatggcccaagtgttgttaactaattttatccgattaatcagtagtctcatccatttaatcagttgcagcctcaaatactcacgtcagttagtgcaccagatcactaccctactttttcgagaaagcataaacaagccgcgagaggcggccgaatgtggctgggcaactgggacggtgagtatgcgccatttttcttcttcaatctgagtatgctgccatagatgttgtcttcaatctgtcagaaaatctctctcaatgtgctctcagctcacacgctcgaactctctgaagaatgtcaaacgatgaacagttaactgaaactcaagaacagagataacagagaagtgttttggtgctgcgcaaaaaccaactgcagcttttcgttttctcttctatttattctcctcgacccatggggttgttacatgcataacagactccgactttgctggatctaacgaccgaacgtgccatcccacgctccaaacccagctcagccactacaactgaaagaactgaaaaaacgctaactgacttgaccgaactctgaaagtttcagtccggtcatgcaatgcacaaaaaaaactgttacatcatgcgaatgactaattcaacctataaaccaggtctggcattcaagattaatagctactctatcattttcccccctaatcttgaatcacctgctccaaacctatcttctttcgaagttcctgaaatcgaactcgtccaacaggttttgtcagaatgtctgcaagctggtcttcagaacgcacatactccacgacaatttgcttcttctccacacactccctgatgaaatggaatcgagtatcaatgtgtttgcttctgtcatgaagtactggattcttacacaaactgattgcagacttgttgtcaattttcatcactatttggttgggtttttcacctagtatttcagccatcagcctgcttagccaaatgccctgacatgcagccgtagtagctgcaatatattcagcttcacacgatgacaaggctaccaccatctgtttttgagattgccagctgatcaaactctctcccaacctgtacagaactccagtggtgctcttcctatcatccatgtctcctgccatatcactatcactgaacccaaccaattccagattttcagacttattccttccaaaccagcagccaattttgagagtcccagaaatatacctcaaaatatgttttactgcggcccaatgttcagaagttggcttttccataaatctacttacatatccaactgaatacgcaagatcaggcctagtattcaccaaatatcggagacttcccacaatgcttctatacaaagctgaatctacagcttcaccattactgtcctttctcagtttcaactttgcctccattggaacctgagttgaattgcagccttccattcctgtcttctccaagatttttgctgcataggcactttgtgacaagaaaaccccatcacttctctggacaacctccattcctagatagtagctcagcaaccccaggtcactcatgcaaaatttatccttcatttccatcttgaaaagttcaatttcaccttcttaagccccactaatgatcaagtcatcaacatacaccccaactatcaacctcgaacttccagttcctctcacatacacagcactttcagtctcggactttgtaaatttcagagagagtagtgtgttatgcaacttagcattctaggcccaaggagcctgcttcaggccatacaacgctttcttcagtcttaacactctgccttcacttccttttttactgaacccaggaggttgcacaacatagacttcttcctctaggtcaccattcaagaaagcagactttacatccatatgatgaatctgccaacctttattcgcagccaaagcaatcaacaatctcacagtctccatccttgccacaggggcaaaaacttcctcaaagtcaatcccttgctgctgaacatatccctttgccactaatctggccttgtgtttcaccactgcacctgctggatccttcttcaccttgaacacccacttcaaaccaattgccttgtgcccagatgggagatctgcaatacaccaggtttggttttcttcgatcgattttaactcttcttgcattgcttccctccaacacacatgttgctcagcttcagcaagactcatgggttcttcacttgccaacaagcattgatcactataatcaaaatccagaacaggctcagtggtggagaggatgtcttgaacacggcgatacctaacaggcccatcatcagaatttggagttaccacactcggcggtgtgcagaattccacccctgcaacccgtcctcagagcccgcagctttcgcccggactccaactcgacgccggcttggaactgtttgattgccgccgctgcttcatgcttgccggacaggagccgaatccacatgtaccggctcatgtcgtccacgagaagcaggaagtacttcctaccacccggtgtcgcaggcgtgattggcccgcacaagtcgccatgcaccagttcgagcgcctcctgtgctctgaacttggcctcctccgggaacgggagtcgccgttgtttgcccgcgagacagccgtcgcacaattgatcaacgtgatcaatggccggaagctcgcgaaccatgttcccctacgccagcctccaaagcgcctgaaaattcaagtgcccgaaacgcgcatgccaccaccatgccgtctcgccgccactcgccgctagacaaacagggcttgcaatgttcaattttagcacatacagatagctattatcacggtataccttggcgagcagcaagccttcgggatcacggagcgtgaatacaccgccccagatgtgtgcatcgtagccgcgcgcgtcgagtcgcccgacgctcacgatgttcttgcgcagcttcggaatgaagtacccgcgtcaagcgaccggtgatctccgttcttgcacttaaacaccacggttccgcgcccctggatgtctatcaccgagccatcgccgaatttgacagtgccgacgactccagtgtcgagctcggcgaaggctgagcgcgcccccgtcatgtgattcgtggccctggtaaccaggaaccattctcctgtgttctccacttcatgcacgtcatcgtcatccaggaccaccttcctttcagtgaggtgcacttcttgcaccctaggtgttcgaccaaatgccgcttcgccagtgagcgacagcccggtcacatgtgccatgagcagagtcggctcctcctctgtctgcaccatgtttgcctcgacgcggcgctgacgtcgcggttttcgacattgcctagcaaaatggccatattgttcacaattaaagcacttcacctttgagatgtcacggccgccgctcccctcggaagccgcctccttgccctttggcgaaccagcagattttccatggcgatttggtgtgccagagccgctgcgaccctttccattgccaccggacgcttcctgctccttctgcttactccgtgcctaccattgttcctccatgagatacaacttgcttcctccttcttcttcttcgtcatcgctgtagctgtcgaccgtcgacagccgcccgacgagctcctcaagagccatcgttttcacgtcgagaagctgctcgagggaaatcgccaccggcttgtacttcttcgggacaacacgcaacagcttcttgttgatgtgttcatcctccatgactccacccatgtcgcgaatgtccgcgacgacggcagtgagccgcatcgcaaactcctccggcgtctctccctccttgaatcgcatcgactcaaattgacgacggaagccctactccttcgcctcacgcacacggtcgacaccgacccgcatggtcttgatggcgtcccacgccgccttcgccgtgtcgtgcttcgccagaccgcgcagcatctcgcgcggcaccgcctagagaatcgcggagagggctgcgcgatcatcgcggtactccgcgtagctggggtcgatcgccatccatagcccttgcgcttgtaggttaacacgcatcaacagagcccaatccgggtaattggtcctcgacagcaccgggaggcgggccgtgtgcccagcgtctctcccctatggcacgagaggaaggttcgcgctgtcagtgccactccccgcgccgctgccacccgcgcctccgtgtccgctgccgcttccgccgccgccaccaccaccaccacggcgtctgggcggtgtgtatcgcccgccatcatcagacatcgtcgcaggaccgtcgtggtaccgctctgataccaattgtcagaaaaactctctcaatgtgctctcagctcacacgctcgaactctctgaagaatgtcaaacgatgaacagttaactgaaactcaagaacagagataacagagaagtgttttggtgatgcgcaaaaaccaactgcagcttttcgttttctctcctatttattctcctcaacccatggggttgttacatgcataacagactccgactttgctggatctaacgaccgaacgtgccatcccacgctccaaacccagctcagccactacaactgaaagaactgaaaaacgctaactgacctgaccgaactctgaaagtttcagtccggtcatgcaatgcacaaaaaaaactgttacatcatgcgaatgactaattcaacctataaactaggtctggcattcaagattaatagctactctatcacaatctacatcggtaatgccaattagttagatcaaatcattctcttaaatctgtgcatagatggtgtcaaagatgggacagagacctaccagcttcaacggcggcagtgcattgtgacatcccggcccaggacttaataggattaatagaatactcatatcaacaagttgtaacttcttttccggaagccgatctcgaaagaactctgaggttaagcgtaattattcccgagtgcacacgagtaaggataaagtgtgcagaaaagacttgcgttggtctgtgaagacattctatgacctagacctatgaaagttgccagatgtaaacgggcctggcctgatagaatactcatatcaataagttgcaacttcttttccggaagccgatctcgaaagaactctgaggttaacaagttgcaacttcttttccggaagctgatcttgaaagaactctgagattaagcgtgcttggcctggagtaatttcgggatgggtgaccgatcgggaaattcttcccgagtgcacacgagcgaggacaaagtgtgcagaaaagacttgtgttggtctgtgagggcagtctatatcctatgaaagttgccagatgtaagcgggcctggcctgggagaggcgagacgttacatgcatccaaccatcaccagtttgcacaagggacgccacttccgcaaaatcaatccacagatcaagaacgcaatgcatccaagtagcacaaggggcgccaattccgcaaagtcaatccacagatcacgaagtcactgaggacgaggttagttaattagtaaatcagtatatacatttgtacatttgctataccataagtacatcatctgtgcacaatgatattcgttacataatcatgtttgattaccacaatttccagcaaattgctatgaggcatggagatatgaccattatttgctctccagagcaatatgcagagacagtagaacaattgtccaaaaaaaaaaaaacaggaaacaatgaagttgctagggctaggtggcttgttaatatgaaggtggtaactctccgccgtatcatgctagttaagattgccaagtcattcaacctagaatcaaagtgttttgtggtaggcggtaaagaaattccattgctagaaactcatgtttataaagtaatggatctgccaatcaaaggggaagaaatatctgtagacaacaaatcaaaaatcaatggtgagttgttcaaccgatacaaaacaccaggaaaaggacacatttctttgtaggggttgagggacaatattttaagatctaagaaggttgatgaagattttatccgtcagattgttttgtgtactattggtgttattttagctcccacaacagattaccatgttgactcaaagcatttgtccattgttgaaaatatttcggatattccaaagctcaactggggaactttcactctgtctcatctaagggttgcatccatacttttgttgaagaagacctagtcaatctgcaaggaaatttaggcctgctctaggtaattgccatataatataatcagttcctgtaaaaaaaatataattagtgtacatattgttttaccctcactgaccaattaattttttttattggcatcaaatcacataaagtctaccttttgtagttttggaactgggaaaggattcaagcatagagtaaatatggtgtttcctattctcctccaattcatacgttgatggcacgttgggacgagagaaatgcaaaactaagaaccaatgcctatgagaaagaaggcatacatggaggcgtggtaacttcagacgaagaacttcatcttattttgtacatgaatccctattgtaactaacagctaaatcatattatacaggttatcataaatttacctgattagtgcatacccaatattgccaataaaaagacacctcttcaatcacatggagaccctatgcaaacacaagcacgccaaccttctcagcaggtacatggagaccatgtgcagaaagttacaagggaacctgcatatcactcggcagaacaccgttctcactcagtccatcattctatcacaaataaccaggttcatatagatttatctcatgataattatactgtctagctatattttttacatattttttcaaaaagaggaataaaaattttttctttgatgtttgaaggttaacctaatacttcaagctatggcgaaggagcgcttctcacttgaaagagtaatccatgatatggaacataaacttctttcaaagattctcactatacaacaggaattaactgagattaaaatgcatgacaccctaccaacaagggtctacaatctagaagtaggtttgtttcaatgtacaaacgatttaaatatatggtctgtctatcattaccatgtatccttcctagatcttgtttacctgtattacaactattctcttttctaggaaatcagcaatgtagttcgcacgtacaattcttctccatttggtgaaccaaactgtaaggtataacgcgtacaaaacatttttgttaaatactaattttaatatataagccttcagctacataaatattctttgtccaactaaaaaattgtttttttatggtaactctcccttttgtaggaacaaacctctcgaatgaacacttgccatgccaacgatggttggaacaaaacttttggagaaaaggaagaaacattacaagggtgtaccaacgtcgatccaaaatgttttcaaatcaattgttccaataaaataccaggcaagcatgttgaaaagatataagaatcatcgcctaatattgctgctccattagaaaagatacaagaatcatcgccaaatattactgctccattagaaaatcccttgcatgaatagtgcatacaaacatttcaccaactcactgcactatgggttctgagcgttcaattttagctacaaaacaattactaaaaaggaccggtggtcgtgacatatatgctactcaccctgtggaatatatttgtatgaggatgacaaataccataatacctcaacacaatatcttggtgagaaattccattcatttttcattcttgcgctttaatttttgccttggtggatattttagactatgcacaatttgaaatttttttctcagactatacagatgattatattctaacaaaagaggacgaagaggtcctacattttgtgaggaatagctacatttgggccacaattgctttaatagctgatattccactcgcaattaatttcctactccccaatgtgaatggaggatggttatatgacacggtgagttaggcaattttacattcgtacaaaaaaaatactaatatttgtgtctaaccaaacatatacatttttttattgcaggtgatcgatgcgtatggttacaccgccaacatagcaaatcataatgcaggagtcatcacaaccttccaaagtaacttattatttgatgattttgaagacttcgattcaagatttgatcatcattgggtttcacaagttggcaagatttgtgttgtgcgacacatggtacattacacacaccttatgaattaactagtatatctataattgaaaagacgtgttagactctggtttatatttgtaacgccccgattttcattcgggattaaaaattatttaataatgcatttcctagaaattaaataaaaagttaagcaatttatccaagtgaattattgggagaattaaaattttccctttaaaaatcattggccgggaatattttgcaatattctttgtgccctaaaatactctccggattttttccgtgaattttcggagctcaagaagtaaatttaagagcacaaagttcattaaaccaactaaataaaaaagaaaacgaattaaaatttccccctctttgtttttgggccgccccagcccaatccccctccccctctcgggctctctctctccctcggcccagctcgccgctcggccctctcatccccaaagtctactttacctccccagccggcctccctctcctctttggccgacagatgggacccatgggcccacctgtcatccccaacctcaggccggcaactgccgttgccgcaatggcagccgaaaaccgcccacgtcgccgccattcccggcctcctcgagccctctctcgcgtggaaccggaaaccacccgtctcctccacctcctcccccgtttttccccaaaaaccggcgccagtttggccccccacgatcccacgatgcctcgccacttcgccggccgttgccgccccactcggccacgatctcctcctccggggcctataaaagtgtaccccggcctcccctcatccgtttccccaactcgccgccccctcccgcgcgctctctcgagctccccacgccgctctcgtgcgccgccgcacgccggcgaccctccagccgcgcgccgtcgccgcttccgtcacccccgcactgcgccgctgccacctatagcatcgcatcgccccaccgcaccccggcatccgctccatttcccctccccgcctccgaagcaccgccgccacgcgcaccatctctttcctccaccatcgccaactccagccgcgcaccaccgccaccatagctgtcgccgcttcgcaccgccaacatcgccagcttctccgccgcgcgggctagctcggccaccgctccgttttcccctttccctaccgaaaccaccatttcaccgtgcacctaaggtcgccgacatattcaccgcctccggtcgcacctcgctgcagctgccgcactgcgccaacaccgccgtcggcttcgccgtgccttgccgctgcccgtccgcccctccttttccactcgcaccccctgaacaccattcccacctcaaacccgagctccaccactaactgccgccaaccggccgcctcttgccgccatccccatccacctcacgccgcgccaccgcctccaccgcattcgctgcatcccaccgcccctcggccgtggctccgccgtggtcgggcgtcgtcggaacgccgttctcgtcacctcccgtgccgaccgccgccatcctttccgccgccgggcgcctctccgtggtcgtctcgccgtcgccgccctcggtgagcactcctctccccttccctctttctccccttagccgggcgcctcccgtgcttgcgcgcgccgtgccgccgccgtcgctttggtcccggccgccgccgccgccgccagccatgtgtgcgcgctggccaggccgcaccgcccggccgtccccagccgtccgatcggccttggccgatctggaccgtcgggtgcgcgcccgcgtggccgatcgccaccgtggactcggtccacggtgggccgtgccgctgacgtgtggggccctccccctttgtggacgtggtccgcgcctcaccccttgctgacgtcagcgaggtccatttcctttgtaaaaataaataataattgcacaataaatcgagtttaattctagaaattcatttaaatggttcaaaacttctaaaattcatacctaattcattcgaactctgaattgagccattcaacttgcaaaattcatctaaaattgagctctacatgtttgtttagtttttatgtactgttttcttggtttttattagagtttttcctcgttttgcgtgccagcgtgtagaatccgtcgtttcggaagtccgcggtcacgaggaaaagagttcggaagatcaaagtgaagaagcaaggcaagtcacacattccccttgagcatgtttatcccaatttacaaatgttttactatttgcaaataaatatgcatattttgctaattacatgggggtcagggttttacctatctgctcgcttgtgccatgtttacttgatatctgtcctttgtcaagtttgggtaataaatcgactagctaatgttacttatgtgacctagctagaactatatgcttagccatgcttaattaccactagctcagttgatgagataattatagtattagacctttttagtatcagaatgagctgcgtgctcgagacatctggccatgcttcatggtcgtaattatccaactaaaatgcgactgaatggtgggctgtgggtgcatggttttgctagtcgcacccatggcaattaaggaccggttcgcgggaaaccctggaagaatttatcgtgcttaccacaagccagcgtgggcaacggctaggcttgtagtgtagctttcctctagctgacgcatctaggcaagggtgggcgtgatggagtttggatgggccctgcgatggcctatgtggcttccggattcacctaggcacgagaggggactgcccgctgccttgcgaggagtggggatgaaacctgaggtgtggtgtgcttggttagagggggttatgcgaagggtcttgtcacggcgtggggctgtgtcttgtgggtacagttgtacgcctctgatcagagtaaaaactattcgaatagccgtgcccgcggttatgggcggtcgaccagattcaccgtgattagtctcacacttaataaatcgacccaatacactgtagttcaggtgggttggttgggcctgttcaacgtggtgtagcgttgatcagtggagatttaatgttactttaattactcaacagttttactgttttgctcaataaaatgttttacaaccgcctttatgcaaatagccacaaaccatccttgtatccccttgcacgtctgcatcgttggtgtggcttgctgagtacggtggttgtactcagccttgctattattcccccttttcagaagtgtagtgcttttgagctgaagacgaagttagaagaccaaggctcagaccccagttgagttatgcctgtggagtggagcggaagccccgctaggatcgcctttttccgctgctgctgctttcgtttcggtgcgaggactaagtgcctcttctgtaagtattttacgctttatttacgtttggaactgtatattacttgtcgttttgtgtatcctggctggtcctggacagggatttaatacacaaaatagtctggaaatttgggctaaatttctgggcgtgacaatatttaaacctagcatgtcaatattaggtatttgtcccattcaatgtgatgggaagccattggagtttattagtggtgaattcactcaagaaggagatcaaaattcttaactctgctgtctcaatgacgaggttgcacgatgaggaaaaggaaaaacgaatagtaatataatcttttaccataaaaacttggcaaataatatagcaaatgtatttgctaatgatgagcattcgaaatttcttgtatggcaggtaacaaacttgcaattatgtatagagcgtgcagttgaaggtggtttggtcacacttatcgagcctataaacattactctgtagaaaaaccagtactatgcccgatataccataacaaatggactagtaagaaaaattcttaatatttgctagcattcatacctaataacagattaatatattgcctttaacttatagaaaaaatcttaatatttgctctcagaatgtaacaaagttcggagaccatcctacaaacatcctatcacggtttgcgaaattgatatggcaattatttatcctttgtgtcactgccactttcagtaatactatttaatattttatgttattcaggaagctgaatttctctcctagattgcaagagacattgagggagaagagcaagctatggatgctgatgtcaaaataatatgcactgcaaaaagaaagagggcaatgaaggtttcaaaaaaaaaaaaactacacatgacagtgtgctacaagatgctaacagaaaaggcctgcatatagtaagtcaaggtacaaagaagcgtgcgcgaacgcaaactaaagaggcaagtactgcaaagtctaacaccaaggaagtaagcccggaaagtaaaacaattgcacaaagagtgtgttctgcgaatcgaaggatgcacactcctagtcaatatcaattgagcccctaccaacaacattagagttatcaaattctctgtttattattttggatcagatttgtaatatttcttatggatcatttttttgcgtatctgacattccatttattcaatgtcattccaatgcgctaagtcagccaaccttactttgttttcagaagtgggaatcatatcaagtttaggcatggttacttattaagagagagaaagagagagagagagagagagaattccactttgcacccatttttgttaccatgtatgcatattggaccagggtttcctaaactttgcggttcacaccatctaaacttgccaaaaggttgcagtttagaccatggaaatgtttcggcagctagcttgttgtcgtggtcattgtcgaaacaagatttcggcaatataaaggggatagcgtacgagacctaaaagtggatatatgcggggacaaggatttagacagggtcaagccctctcgatgagaggtaataccctactcctgtttggggatttgaatctgccagatgttgtattgatctgacgatctagttgtaaatcctcctgccctagagggcctcctacccaccttatataggatggggggcaaggttacaagataaaaactttaaccattacggtattggtttcctaaatctactttacaatataatcaaaacaggactttaggctgttccgtaatatacaaggaaacgtaatacccaagtcatgatctatacatattctatagatataagttatcccctataactagtcggataaccataccatgtgggtatgggatacccataatctccgcaacattctaaaatcaaattctacgctgaaatcagcaacaattgcagcccagttttgcaagtcacacaaaacaaccaatcttatcaaaaaaaaaaaaaaccattgtacaattctactactctagcataccagcaaccttcaactctagtgaatggaagaaaaacaacaattctatcacacctgtaacattattctctagtgcaattcattctaaaagaggcacaaagtgcaattcactctaccaaaattctgtccaacccttaatagctcaagttaaagggcatctaacaaaaggatccaaaacaagctgaatgtaaatataacagtcacaacacggcaagatcgaaatcaactactagatgaatgcacctcgaaatatcagatcaagttaactcacgtctacgcagagccaggaggcttactccaaatcgccagcagctgcggccatggccaacgcgagctcgcggtcgtcgatggtacactgtgaaggaaggggagcccatgcgcttcgcatcaatcaggagacgcattgcaactacgaaccagaaaataataattagaaaaattatgtgccgttgcgatttctattcacccccaaattctcagcggaagaagagcaccactactcgccgagggaactaaggcgaggggacgagaacgatgaaccttgaaggccggcgcttcgccgcggatgatacggcagaacacacagctcttcccttcccgtcccggcgatggaggcggcggcgcaaggggaggtcaagacccccgcgctttgctccgcgcacatgatgtcctggtcaccttcgctggaaggggcgccgaggtggagatgggagcggagcacggcgaggcgccgcgatagcgacatttgtgtgggagacaaggtggggatgaaagcgtggtctatggacagggctcgcgtgccttcacgcctcttcccctctgcatcagtcacctccacctccacctgcaatcccaccgacggttggagaggagcgccccaaagcggagacagaggggtcggccgccgcgagctcgcggtcatgggcaccgaggtcgcggtcgtcgacacacgctccgaaggacggggatcccgtgcgccaccgcctctccgcctgaaatggattgacggaggtgcgacggcggagacggccgccgcgagctcgcggtgctgggcgccgagctccgatggtggacaatcccgtgtgcctccggttctccccctctgccaactttctcgaagacctccacaaacacctagggtatgtttggctaatgggttagggagatgatttcccatccactaaaagacatctttaaattccaaccattcattcttcccacctcatttcatcttagctcttcattcattttcattttccaatcccacatctcataacccattatccaaacacgaacagacatagaacggatcgggagtagagaagacgcttttgccctttaccgattttttttaatgaaaatcaattaacattttaattttccaccttccatacctagcccacccttttgatatcttcttcctagtaacttctctctttgtgcgttagatcattattgatcaaggatcctaattaattccaagcatagaagttctcatattttggacccatgatagattgatttagaacatgcggagcttattacatacctttcataattttcactttcatattcacatgcatgaaacttaaaaaaaaactcacaaaattattagtctcatataattggatttataattaatcaccaataccaaacttaaactttcaattatttgtgacgaccaattcaatttgtttattgtggagatacccatattacactgaactgtacgttatcatagtataacaaatcctaggtagagaagacagatccatcagacgtacaccatcctctggaaatattttatagtatagtaataatcgtatctggccagccagtggccaaaataatataatcttcaccgtcatcgatccattaatctaagacctaaaggagaggtcaaatcataaatcctcggtagcaggtagcttgagttagtaggagacacgggaagctagcaagtagcaagcggagatggagatggaggaggtggtggaggacgccgcccatggcatcgtcatcgtcggcggcggcatctgcggcctcgccaccgctctcgcccttcaccggtacacgcacctgttctctcactcgaccatatctcctccatcgatcgaccttaccgtgcagacaagtaggagtagtttttgtggttttgtccatgcctctcgtcgctatcgtcgtcgctgttcgtcctagattgtcgaccaattcgtgactagatagcatcgaatatcctgcttttcctcgtcctcggggaaaaaagaatctgaactaatgctaagaagaagacgacgaggaggaaatggattaatctctggttgtgggtttgagtgcaggaaggggataagcagcctcgtgctggagaggtccgaggcgctgcgagcagacggcgtggccatcggcatccacgccaacggatggcgagctctggagcatcttggcgtcgcggcggtgctcagggaggccaccaacgccatcaccgcgtaactagaattaatcaacctcagccttcatcaggttgcaataggatcactgaataatcatttacaaatgtgaaatgtatactgcgtttcaggtatcgcagcgtgtggcagctgcagaacaagaccaccctgctgcctgccaggtgaagttttgcgcgcggtttgtcaactactaccgagctagtaccaaatgctggctaagatcattgaggttttgcctccattctgttcgatcaaatgctaggaaggagcttcggtgcttgacaagaaaggatttggtggagacgctggccaagaacctgcctgcagggacgatccgcttcggctgtcgcgtcgcggccgtcgacgaagactccggcagccgctgcccggttcttaccacggaggatggacacaccatcaaggccaaggtgattaattgactaattgcaacgtctctcaagtctcaacacatccctgaaatcaattgcacagtaatttatgaataaaaattttatatacatgttcttaatttaaaagtaaaggctggaaaaataaactacgataaaaaaccccaaaatcgacttaaattttctaaatttaaggttgaaaaaaatcaaattttagtcgataagtatgagcgaaaagatgaagccgtgtctcaatccaaatgcatgattgatcctattcctagtcctagcaggtgctgattggctgcgacggcgccaattcggtggtggctaaatacttgggattagggaatccgtcggagcttcctcgtttggccattcttggcctcgccagctacccggacggccatccatttggaacagagttcctgaccattgccggcgatgatctcgccgtcggacggctgcccatcaacgaccatctcgtccatttcttcctcagcaggcgcaggcattccacaggtacacagacaaacgatcactggctacagtatacgttagctatctgaaaaaagtttcaccgttatctgaaaaaaaaatctgaaaaagttcagaaatataagaggagcgacaaggaaaactctttttatccttgtttcgttatgaaaaattctcaaaatattacatatttaatcccataaagttttaaattgaaacttaactcgcatatagagagaaaagaaaaggccaaaagacaaacccagcgtttggggttgggtgttataggtgttttcaggtgtttattgtatcttttgggaaatgatcttgaggtgtttataggatggcgctttcggtgtaaaccattatgttgggttgatgcgcatctcttctttatcaatcaaatgaagcattgttcttctttttaaaaaaacaacgtttgaacagtggtctgttatgcatttcagaatatttcctcggtgatagttgtcattgtgctactttgttaaaaaaaaattccataatcatttgcattgcgtttgaaaataaaaacacaacagaggagatgtcttctcgaggaattagaatgtttgacaaagtgttgattataaaccgtacaacttattaaaaaatattttataagtaaaacatttatatatgcgttactagtgatttaaaagctagcattgaggacttatcccaaaaataaacgttgataaaaagaattgaaattaactttaaaagtcaagttttaaaactgtagcactaatgtttgggacgaactcacaaacatgtgatgatctccagacatggcacgagacgcgagcgccgcgagggagtacgtgctggagaagctgcaggagtgccccgccgacgtcgtcgacatggtgcggcggtgcgaccatgcgtcatcgctgtggaccacgacgaaggtgtggtacaggcccccctggcaggtggcgctcgccgccttcttccagctgaggcggcgcgccgccgtgacggtcgccggcgacgcgatgcacgtcatgggcccgttcatcggccagggcggctcctccgcgctggaggacgccgtcgtgctcgcccgctcgctatcgtcgtcgcgtgccaccgtagaaggtggcgccgacgacttggccggtgaccgtggtcgccggcacgatcagccgcaggtcgacggcgagatgggcgcggcgatagggaggtacgtgagggagaggagggcgagggtgataaggctgtcgctggagtccttcaccgttgggactttgctaagaacgaagtcggccgtggtaaggcttgtgtgcgcggtcgtcatggctcttctaggcaccaggtcacgcaggcatgcagactatgactgcggctctctgtaacttttctgaagtgataagaagtttgtttttacttccttgaattattcgatctgttataactaggggtctgttgttcactttgatgcaaaaaaaaaactttatcaaattttagcaatgccaaaattttggcatggcaggatttcttatatagttatcaaaatttggcagcaaactaaatgtagctacttttttgataactttacacttggtaaggttaaaaatgacatcaaaatgaacaagccctaggtgaaaccccgcgcattactaatttagtatgaagatatacattgaaacattatgtgaattatgttggatgataatttaacatgtttgtgtttgaaaaactcttaaattataaaaactataaagatataacatgtttacatgatgtttaaatgtgatgattgttagtgtatgatgatgtggcatcttgttaattagtggatgatgatgtggcatctttgcatgaagatatacattgaaacattatgtgaattatgttggatgataatttaacatgtttgtatttgaaaagctcttaaattataaaaattataaatatatagcatgtttgcatgatgtttaaatgtgatgattgttagtggatgatgatgtgacatcttgttaattagtggatgatgatgtggcatcttgttagtggatgatgatgtagcatctttgcatgttaagcttaaggagttagtaggggataactttatagtaagataggattaaacaacttaatcgactggccctgattgattcagcttagaattattataatctaaattattaggagtaagcaagcagattattataataaattattataatccataagctagattagtactaatctaatgaatttctttggaggagcatttttttcagattattgagtggctaaagacccattacccttagatgcatccaagatccagagaaataaacaactcgcaacttaagtatagtaattctctcaaatgaaaaccattttgtgtgaaattgcacttgctacaaggaaacatatactccctccatctccctttataagggatcctaagttttcttacagagttgagaggaaaacaccataatattccattgtgtataacccacctttaagttttgccactctactttagaaaaggaagaaaacccgaattacccttttaaaatatcacagtcgatcgaattacccctgaacttgaatactagatattttacacctccaactatgtaaaccgaaaaaataaccctcggctcaattttggggtggttttggtactatgtgatagtccagttagcaattcctttttttttaaaaaaaaaagttaagccccatatgttagtttctcaccctctacatctctctctagtctatctcatcgcgtctaatcgtgtgaagtcaacggtgcatagcgaccgaacagaggagctttccctctctatatctccctcctttcagcgaaggcggctaggggcgacgggcggggacggaggcaggtagggaaggcagacgatgacggaggcaaccggaagcggcaagcaggggtagaggcagctatgggcggcagagggggagccgaggatggtgacgcgccaacgccgatgctagaaatggtgccaatgtcgaggtcaaggaggggctgtaacgaggagatgtcgtggacgcctccgagtgtgcccggatctcccgccgccgagggtgcctccctgagagcgccgactctccctccgccactggcgtcttctcatgagcatcgattctcccgcctccatgggtgcctccctgagagctctggcttccctgtcgccatgggtgcctccctgtgagggccatctcctcgccaccatgggtgcctccgagtgagagctggctctcccgtcgatagtgagaatctggagaagcttaaaattctaagaagcagctggtgagaatctggagaagctaggaaactcagcttctgacttctaatttattttctagattctataatcactgtttctcagaatctgagtgaaaatatgtactgtctagggagcttatgatagttgcagcttcgagaagaatttccagctgccagaagcttccttaaacaagccctttaagggcccatttgattcacaggataggaaaaacacaggaatagaaaaaaaacgtagaaattgaaatagtatgtttcttaaatcttacagcaatcaacaaacacaggaaagacaaaaagagtactttgatagtgctatgggaaaaacaaagaaaagttcaaaaaaaaggtcaaacctcttgttatttttcgggagaatagctaatatggtccctaaagtttcgctactgggtcattttagtccttaatctttcatattgtccaaacaagtctttgaaatttgtcatgtgggctaatatagtccttggtcccaccaaaattgccacatggacatgccatgtcaccttactatgcaaaatctatatgatttgtccaatttacccttacacataagaaaataaaaaacaaaaggaaaaagttaaaaaaatatatggtatatgtaagagcaaaaatatacctcaaaagggtaaaaaagaagttttttttttcctatagttatgtctaattcacccttatatttatttttctatgatatacgtaagggtaaattggataattcgtcatagattttgcatgaatgatgacatggcatatccatatgatgattttggtggacccaaggactattctaggacttatgacaaaggttaaggatttctttggaccatttaaaaggttagggactaaactgatcatacagagaaactttagggactaaagtagctattctcccttatttttcctatgaaatataaagcataggaatatagccctatgaaaagtttcatttctttcctacgaatcaaacggacatgtaggaaaaaatccgtaggaatttaatttctaaaaaaatcctttaccaatcctatgaatcaaagaggccttctagggagatcatggtaaactttaaggatgtatgtagatcttccggagtaaatatcggaggagcatattagctaaacacccctctcacaatgcttctcacagtacctcttaaaaggtagtacttcagatagcggtaaaagtgtatttaatgtttcttacctcttttttttaacgatgtccatagagcgcaatgtatcatgtaatgtgtgtgttgattgtactaagtgaaaattaattaaccaggtctccacgtgccccgggcgcagaaatatggcgaagttgaagtacgtttggagggcttgacagtgagacagacgccaaaaggaaccgaaaacatcccccttgtgcttccgtgtgtgcgcgcgcgctggacgctttgacaaacatgagattatatccgttcgacggttgcatacaaatacaaggacgtatgatcgacagtgagagaatcggcacgaggtcacccatgccatgcgtttttctggtcccccttggcccctcatcaacatcgtggcggacaaacttcccaagttcctttcacccaccaactgatgtttctacaggactatgcaacgcgattgcgacggggtttcaggccgctttctaaacaactgataaagctgactaaccaataaaatcaaattgattattatatattattatattgttagaaggaaaaattctaccattgctagtgttatgagttctgttccacttaatgtttcctttaggagagccttagttggctagaatcttacatattggcatgaattgtgtacttctattatacatattcaattgaaccattcttctgattgctttatatggaattatcatcagagtggtagtttttctgttaggtcaatgtatctagctttaattaataatggatatattgaaagaaataagattatttggaagcttaagatgccactcaagattaagatctttatgtggtactttcttaaaggagttgtgctgactaaggacaatttggcaagacgaaattggaatggcagtttaagatgttgtttctgcatgaaaaataagaccatacaacatctttttcttgactgtcattatgtaagatttgtttggagagcagtacaattctcttttggtttaaaccttccaagtaccatatctaatatgtttgatgggtggcttatgggggttaataagaagaagtgtaatctcatacttgtaggaacatttgccatatgttaggctctatggttgagtaggaatgatttagtttttaacaaatcaccatatacttcatatatgcaggtaatattcaaggtaacatattggctccagttttgggcaaagctgcaaaagtgtgaagagaatggtgaacttatgaaggttgcatgccgcaaactcgagacgacggtgatgcaactctttgcaaactatggatggagattcacaaatagactagaataaatgtgtactctttatcttggtttgcttttattttgattgagtgtgtttgattacatttgaactacactctttgtatgagtgatactttgtaataattggctataactctgttgagtcaaggccgggatataaatttcattatctaaaaaatagattattatagagttaacaagtactcttactagcttggaaaaaaaacatctagggaataatgatgatgtagaaagttttttattaactcgtgtttttgatagctccgttacctacaaagaacgaggcctgacccgctatcatcaaagtgaccatttccgcgccttgagttgcgcattccacacttcacagcatgcagccaagcgttgcatatctcatcaggcaggcattggatcacatattcacatggcagccataggctgggagtcccccaggcgaggtagaaatcgaatgaatattacagaataaaatggtgaaaactcaaaaggcttcttctgcctataggggatttactatgatttaccaacgatagcgagaacaaaattatagcaaaagaaatacaacaaatgacgctaaactgactttggtactttacaaaaggcgaaaaaactgcagatcctatccacacttgcatggagaaaaatagcaagctgcaacttccgatgtgctcttacaaaaacaggcatcagtctcggcaagagaattctgaatgcgcgacccgcatcatcacaactgtgcaggatcgtcccacaaatgctcaatccccggggaacaaacaaggctcacttggtggtgatgctttgcgttgcgcctgaagcattgttcggcaaatccgtgagagtaaccagctttgcaactgcatcaacagcagacagatcatcaccatctgttagaactgcagtaacaacatctgaagatactccagtgctcaattggatagtattggagtgctgcccactgctaacttctacagcatttgtcatatcgcgggccatagaactggatgtttcacttaattcgtctgtatccaggaataggcagaccacagcacaatcatcaattttagaagtggggaaacgtgcacgccaggcacggtgagctgattcgactagcaatcgtgctgcagaggcccgagaagtagctctgttgacaatactaacaacttcagtgtttgacagcacatcccaaacctacaaataagcacataaatttaggaaattgtatcatattcaggaaatgacatggtgcgtgcaactcaagatctgcttaccccatcagtagccaatacaacaaactcatccttttctgtgatacggtggtacgagacttcaggcatagagattagaccataatccttgagacagaagtctccaaatgccctagccatggccagtccaggggagttgtacttcggaagccaaacacgagcaacctctggctcctcaggaagtgcaaatatcctgcccctgcgttgcctgattcgctgtgcttcacctgaaaaagaaccatagtacagcatgcatttcaactcagcaatcttcatataataaaatgaggaattggagaagacatggcatgcatctcacaaattttgcagctatccattacggaattaaattgtttattgtattacgttgctggcccgaagctctgcaactttgctcagttaactaggagcaaaaaatattcagcagtatttgctactaccatagtaacattaaatatttgtcatcaaatattcatatctgtaagctgaaataacatttatatattgtaaaagggataccagaggaaacttccaaccagctacaggatgatatcaataacatctgtagacactcatccaaagttaaatgtatttttacaatttataaacactagaagggtcaaattccacagttctcagtagcaagtcggaaagtaacatttgtgtcactaacaggtggccctaggacccacttgtcaacctcacaaaggataataccttccaaattgcatatatttagtgttgctaagcacttcttttttgtcatagaaatacatctagaccaaaatgcttggacttgttattaacttctacgttgtcttcagggtgcaaatctgaaccttatttattttaacatgacataaaaaaaatccaaaagctttcataatttaattttagtacagatccatgtgaatgctggaacaaacatttcatgaacaaacaatatatgtacccattatagaacaattagatactaataacatggttcttcagacttatgaaaaacaataggcaatcacattggagaacaaatatgaaatgatgaaagctactccacagcttaatatctaggaatattgcatagtccaaagatacataagggcccacaagaggactacagttcacaacaaaatcaacaaaccacaaacgaagaaaatatgatgacacaacaagggtgacaaaaaaatatatatgtaaaagataattaggttaaagagaaacagcagagagaaaaaagtaggaaggaaaatgtataacatacttggaatgttaggtttgagatcaactgtcaattggacagccataagctgattatctttatctcttgtgcctaagatggcccgcgagtccccgaggttaccaattataagattccgtccctgcatttaacaagaataagagaacaaaatcaatattccagcatgcactttgagcagcttttcaactgaatggaaccaacagtagggatttctgtaaaacaaaatcagatatgggttccgttcaattacctgcttgagcactgccactgctgttgttccactgaaaaaacaatctatacttttatgtaacttgagatctctatccatgacattgaacgccctcaaaaatgaagttctcaatgctgtgaagatctctgggtactctccgttctgctcagcatctctgcccatgtttccaggggatcctgtttcatctccattgcttttgatgctgctagtggatgtctgtcgtccttcatccgtccccaaatccgcaccaagcttaatgggcagaagatctctcaccctcttagcaaccaaatggccgtttggtccatggccatcaaaaacaccacaaaaaatggtatcctctcttgaacagaaattctgtacccaatagaaatatctgtttagtataaatcatatcctccataggtacataagaaccacaaaaatttacatcgtaaactgttgattaaaaaggatacaggagattggtaattagtgtgaaattagaaactgatattatcatttcctaaaagtatgtggcatgccaaggaagaatttagaattgatggtactaagcagaagcaacgggtgtaattcctgcccagaacataatctgcacaaagggtgagagcaactgcgccaagtagggctcatatgcaggctctatgaacacagggtaccaagccgccgattgcgttacgcacacttctcactattacctatttcctatataccataagaaagccagaacagtgtgcatttttttttctttttgtagaaggttagtacagttgtcaaatcatgtgagtctaaattgagaaaactgcctaggaaattcttgcaaggtacaaattccaggaaacaaatgctgacatgaacggtatatgtggcactgacacgatgtgagccaaattgtaatcaaacatatggaaaggggagtgggggtggtcaagcagataagatcatccagcaaggagagggaaataaaaaggaactatggatggataagcatgaaaatcatgtggagcccctacatcccccagcaagtattccaaatcaatagcaatcattagacttgaattaaacaaccacaatagaaactctctaccagcaacatccaatgacaatccatgcctcagaattagtattaaatttcagtcaaagtttaattcttgcaagcttcgatatgtgggtaagctccttacacttgttgcgtaattgatgagaacataaactggatgtgctccaattagcagccggttgatgttaacatcaagaacaactcaattacgataagtcttcaaacaaaaaaaataaattccttgattccgatgtgtaaatctagatcaaaggacgagacagttaatacatgtcggatcaatttcgttccagcctacagagattaaatcaagcaatagtaacgggagcatagtacgaattgcatgtcaggagaattgcaagaaaacgaatcgtgaaagagatttgcaaagaaaaaaggtagagacaggaaagcaagaagcgatggtgatttttttacctcccagacgatcatggcgtcttggttgacgcctttcttcccctgcagcgtgtagagcgacgcgacggcgcaggccccgttccccgcgatccggccggggatccccctcagctcggcggcggcgcggcgcccatccgccccaggcgcgggccctcgcggcgtctgcgccgccaggcgcggctgctgcctctgcggcctcgccgccgccgcccacgtgacgccgagcgcgcgcagcacgccgaggaggcacccgaggatgtcctcgacgcagcccccgccaccccccgccgcgggcgcgggcgtggccgcgggcgccaccatgacgacgcgcgcggccaccgcgaccgcgacgaggcgctggtgctgctgctgctgccgccgccgctcgcccccgccgctaggccgccgacggttggcccccgaccggcgccccgcggcggcctccaccatgcacccgcagccgatccgccccccggcgccgcgcgcctcccctccctcctcctcctccgatggctacaagcgcgcgcccccgatggctttgccgaggggtggcgctgctgctgctgctattattgtatcccgcaacgcaacgaaacgaatggcctcccaatcccaaaccaaggcagccaatggggaaggaggtagttggttacgggacaagaggcccgcgtgggtctcaacggcgacgcgactaatccaatcgccctaatcaacgacgacgcctctgccgtcaaaattctctccctgcgtggtggtggacgagcggcggggcgagccaagggcggtgcggtgcggggcgaatctggggaggaggaaaaagggcaagtaaaaagggcggaaaagggaatggagggagagagggacgcgaggaggaaggaaggaaggagtagttggagaggtaataattgttcttttccccgttgaagcggagaagcttgtgtgtgtgtggctctcggccctcgcgtcaggaaaggtgcgggatttgctgcccacggcgtcaaaaaggatggtgacgatggtcggagacgcgacggatggcggcaggagggcagccactcatacatcacgttttctatttcgccgggtcactgtaatagcagtatattgtatgccatagcgaaaaaactgatgatacaataatactccctccgtctcacaatataaaggattttgagtttttcttgtaacgtttgaccacttgtcttattcaaatttttttttaaatataaaaaacgaaaagttgtgattaaagtactgtagataataaagtaagtcacaaataaaataaataataatttaaaaaaattttgaataagacgagtggttaaacgttacaagtaaaaactcaaaatcccttatattatgggacggagagagtatgtacagagtttggggtatgacgatgacaaccaccgaagaagggttatgtttcttatgttattttattgcgttcgctgctgtggtttcaaatttgccagatcacaataataatgtgcattgtttgttgcggccaaaaaccgataggatcctatgtatagagtttgaagggaaacaaccactaccaaaacgttgcgtttccaattgacgatgtagtgttcactattataatttcaaatttgtcatatcatttgttatgttattctatatttacggtgaaaaacttgcaaaatcccatgtaggatttgtgaggggcaagaacagatcaactattgaagcattatgttttccttatgattgtagactttttttttctattttgccagctcactgcaatgatatgatattgtctgttgcggcagaaactagcaaattctatatatagagttgcgtacttcatacattttttggggggaggcgtgtgtggctcctagccggtggctgtgagggagagaaggagattatttagggtttggtttaccttatatatgactccgtctattggccaattgagctaactgggctttatgccttggagtaggctatttttagatgagtaacacacatcctcgagaccctgtgggtagcttttcatcccttcctccgtacccggaaattcgcgggggcccatccctgctcaccggcccccttcccgtagggaagggtctctgtggagtcctcggctccaacagggaaattaccacccagtattggaccattcttgtctcgacgttcatttaaaccatatgttttcgttgatgctagttatatctgatcctaaatcttgtttttccacatattcgagtatctagtatctagagacacatttgagttggagaaaatggatagatgtcatcaattttcaagaaattgtaagaatagaaattcgagagactcaaagaaatcatgcatgatatatatagtattcctatcaccaatatgcattttgtgcttacattttttgtgaacactttcttctcttctatctctatgcataggtataaaatgccatttgacctcctccaacgcatttattatccgtggctacattactgatgatgatattgttgggctagatttgccctcaataaaccaaacagaaaagatcatcaactctggtgtctcaacaaataggtcttaatttataccaaggagagtttgcattggtgtagtgtggcaattatatatagagccaggagaaattatcagggttttggtgacgagcaagtaatgatcgatctagagtgtttccgcagcagttcaccatcacccgtcccgacaaactaagagcaggcacgtacaatatttctacttagtaggctccaaaacttttttttatcattaaatctatgcataaaggagagagaatcgaagagacgatgaaacgggcgactaagagcaagatcaatagtgtagccagcaaccggctccacttacctttatattattttgtagttaataaaaaacaaccggtacaatagattatctcttatgtagactgcaacttattaataaaataattaattatgcatgcccgcgtgaatatgtatgatcaaccctaaactatatctgtgtagctatctgtatattgtgaacttgtgatatgaacaagaactcgtaaaaaagttgattaggttgtagataattactgctagtgaaatgttgatgggaagatgcaaatctcgctcctaaaaaatccatctactgtcagctttctgtaaacaacatgcatatatcgagagaaacgggaaaaggaacatagaaaaaaaatccccaaatccactaacataacggaaatcatgacccatttctcctagctacttgtttgcttcaaccaacggaatagccacaaggcggcagtagatctggcatggcaacagtgctttcttcttcagaatgagtgcatcaatctgtagattggcgcatggaaaagcgctaccaccgcgcacctcttttttttttacgagttcttgttcatatcacaagttcacaacatatatatgagtttagggttgatcatatttattcactcgggtatgcgtaattaattattttatcaataaggtgcagtttatatagagcacgtatcctatgcacataggtcctcgcgtgtgcacaccgtacacaccaactaaaaattatcacaaaaacttatagaaaaattcatacatgtacttccaatagtattacatctacatgcaaagtcccatcttcaaattcattctacatagagagtaacaaaaaagataaaattctgacaaaattacaacctaaaaactatcagattttattttatttttgttacggctaaaatataatgaatttaaggttaagaatttaaccctaagtgtaatactattgaaagtatatgtatgaatttttctaatttttgggtgacattttttaattggtgtgtacgtgtgtacacgtgagagcttgtgtgtataggatatgttgccgtttatataagagctaaactattatactagttgtttttagtattagctacaaaataatactccctccatctacttttgatagtcatatttcatcttggcacacagaccaacgataagtgattctacttatcatccatttaaacatgctactaaccatttcttgtaaacaagcgattcattaatatttacatttctcgatgcccatgtagccaatcttgtgtggaagaataaagagtcacgcattaaatccaagaaagttattaagatgataagttgttgaattgaaatatgcctatcaaaagtaaattttttagatttgaaaatataactatcaaaagtagatggagggataaagttaagtggagccagctactggctacgctattgatcttgctctaagagcaaatctagtagcacaatccaatgcttactccaaatattgctacatctgcattcgtacaataataataaaagcattgttctttaaacaattatttttctcctggtgccatgtgctctctctcctaagaatggtgttgaattactagtattgctcaaacttgccttggagcgagtgtagtcagcgtttaaacagttgtcctctggtatcttctctctcctttagctcatttttaaaatcgatatagtaggcatatagctggttattttatctgttctaaccgtgcacgagcacatggtcgctgcttcccattaattaatcacgcagcgcttaacctaacctacatgcggcgcatggacgaccaaagtacacacggatgaggcccgtgaacgtgtgcgtatatatacagaagcaggcggccaactgacaactgggccgaccgggccggcgcgcgtgacggcgacggcgacgcgggtacatgcggtccttgtcgcgtaaatgacgctagctagctttattaatttggcgctcgtgtctcacgtgttgctgctgctgagctatcaactgcccgacgagaccctgcctcctgctacaaatgatgtagagattcactgttcatgtgaagatcaacgcaataaacagtctatatgcactgtagctacatggccataaacactgcagcacaatatgtgaaccttacgatcttgatcgggtggctgccaactcaactaatgcaggatacatgttcgtactctacgttagaacctccttggctccttcaatgcagaggatcctgatccataacgacggtgtgcccacccaccaccgatcgcatctgacaatcgagctagcatatatgcagcttggctggccgaacacaaccatgtacgtacatcgtggattggtttggggtattgatatatcccatgcatatgatcccgtacgtcgtggattggtcgggcatgtcgaggaggacgccgcggcgtacgtgcagtagtgtggattggtccaatattttctgacgatacaagtggctcggtcggtcggggaccctagctatgtatgtacgtggagcgtgtcggcatatatgtacatcgtggattggtctctcttcatctaaaccacacgagacacacgtatatgatttttttttttgatcggatcgtccaacgacgatatcatgacgtaataccaaaattaacttgctgtgttatgtacttctaccttacggtctgctcttttgttcgttatctctaattttatttaatgacttttagcgaaataaattagcttatggtcggtctatcgttttcttagtttttcgttatctctaatttcatttagtgtcttttagcgaaataaattactaattagcttatggtcggaaacgctccaagtcgcagagagtgtgactatctccaagttgggaagtaagacatggaaatgaagtcgacgtgaatatgaatattgacctacgtgtacggtgtaccgacctttcttcgcaaattaaatgtttaccctgtaccatgatcgatccatcaggtgatgaggagagtgatgcaaacaacgaaataaaaccaccactatatacacgacgttaacgcattaattttgctatatactgagttaattgtttccgaaaatgttactctcatctgatcagaatccatcaatcttttgtcagatgacaacagagggatctcgtggaggttatcgactgacggtgtgtattcggccaaatcaccgcgccaccagcaaaatccatccattggtgacgcagtccgcgccgttcgtggcatagaaccatttcgacgacagcaataacaaaaaaaaaagggtgtcattccaattcccaatgaggattccttgcctggggtagctatcgagtcacgcatctcccagcccaactgcagccaatggctgaataactacgtacttttcatcgtgctataccgattgaaaccttgtcttgcaaaatgtccgtattccgtaacaatctggccggtctaatctagcctcggtaaacaatgacttaaaaaatctcaaattagaatggatagcccaccaccactctatgtagagttacaaattaatccaatatgtgtgctaaataactagttatcgtgctatcgattaaaaccttgtcctgcaatgtccatattccgtaacaatctggccggtctaatctagcctcggtaaacaatgacttgaaaaatctcaaaatcagagtggacagcacaccaccactctatggaattacaaatccaatgtgtgtgcttactttctaggacatcttttttacgtgttgatctacgaaaagtttgctaggataaatagtatatttaaaaatatgaaaaagaattcggcttttacttcaactgaagctataatcacttgttacacagttcttcgaagtccaagtgtcggtgacatgggaccgggggtatcttgactagaggtttggggcagccgcggtcacccacgtggcctgaccccctcgggggggtcgggcccgagggtgacgtggccgcccctccctctgtctccccgaggggtcgggccgctcccgtttcggccccgagggctggggcgccccgaccccctgtgggtttggcgccacgtgtgtgggttaggtgagcacagaggcgctcacctaaccgcatttatcgcaggttggacgagcgcgccacgccgcatttaatgcagtgcaatgcgcgctcgaccagtccgtgaccagtcgtagtgagtgaccggtcacagaccgatcagatcgcgggttaggtggcaacaggcggcctgtcacacgtctcgccccgtcccgtcgaaatgatgagagcctccatgctctcgtccctagccggagctggcgtgttaacccctggatttggcacgtcagtcccggtcagatacactccaggcttcatcgcaaccattgcaaggaagtcattgtatgaagaagggcagacgtgtggcatgctaaactgacgcgtggtggacaaggatgaccggtttgtgactggtctgacgccggtcacatcatcggcagacaccgtgctcccacgttgcatctgctttcggcaaagtggaggtaggtatgacccatcccatcggagggtcattcgaacaacagccattgcaaatctccgcccattaatgaaggaaggacagggttgtccccggtgtcaagagaaggcgcgagccaagttttggtcaagatagggtgagtccccatccaaaagaagagtaggtagaagtggtgcatgtggtatccccttgagatataaaaggaggaccttgcccacttaagagaggagactctcagacaactcggagaacacctgagctcgtagaggggagaaagagaaagaggaagagggtttctagagcttgaactctcttactctttagctctttgtaactccttcatacacagatccaccagaacacaggagtagggtattacgcttctcagcggcctgaacctgtctacatcgcccgtgtcttgtgcatttgctctctcgcgaaacattccacagatcgagggcttagaacctcacctagcgccctcggccgaaccggcaaaggggggcccgcgcggtctctcggtgaggagccccacgctccgtcatctggcgcgccaggtagggggcgcgcgtgtttttctaagccctcgtcctctttcgtgtgcgccaagcttctcccgctcagcccaatggctgaacgggcagtagcgcataacctctctccgagcgctagcggtgacgacggggagcagaacccgtgccgtcgagctcgtactccaccgtccccctctcgccgaagtcttgggcgggaggaggcgctcgagggggtcgaaagatccgcgacttcgccgctcgcgggcgatggagaaggacggcgggacggggagcgtcgcctcctcgtctacggcgacggcagcacgccccagggcgcgctcctgcgtcacccgcccgtcgtccccgatccagagactccagcccgacgttggctggatgacgtggccaacttggtcataacggcgcagcagcacctaggcaccggcgggcggtcctccgccaccaaggcctctgatgctgctaccaccggctccgcgtcgtcgaggcggagagcgcggcgagcggcggctgttacccgccgttcgtccgccattccctcatcaacgcctccgacccaagaagacgtgcgtggggggccggatgcccgcctcagtatcgagcgccggtgcaattgtcgtcgtgctgcccacgcaacggagggcgcctcctcgtccggagcgccactttggtccgggcacgggggccagccccccatgtccccggttggcggtgccggctgtcgagcctttgtggcgagccttcggaatgtccgttggcccccaaggttccggcccaccatcaccgaaaaatacgacggaagcgtcaaccgcgccgagtttctccagatctacatgactaggatcgaggccgccgggggtgacgacagggtcatggcgaatttcttccccatggccttgaaaggtcaggcgcggggttggctaatgaacttgccacccgcgtcggtccactcttgggaggatttgtgccagcagttcaccatgaacttccagggcacatatcctcgcccaggtgaagaagcggacttgcatgcggtacagcgaagggacgatgagtctcttcgctcgtacattcagcggttctgtcaagtccgcaacaccataccatgcatccccgcacacgtggtgatctacgcgttcagggggggcgtgcggcacaaccgcatgctcgagaagatcgcctccaaggagccccagaccaccgcggagctttttcagctcgcggaccgtgtggctcgcaaggaggaggcctggacctggaactcctccggttccggtgtggcagcttcggccgcccccgggtccgccgctccgtcagggcggcgggacaggaggaggaagaagaggtcggcccattccgatgacgagggtcacgtcctcgccgtcgagggcgcttcgcgggccacccgaaaggggaggcctgcgagcgacaaaaagaaggaggccggcgctcccagcagggagcgcccgaccggcaagtggtgttccgtgcacaacacctccctccacgacctcgcggactgccgcgcagtcaaaagtttggctgagcggacgaggaagtgggaggaggagaggaggcaggagcgccgtgagggcaaggccccggcggctcccgccggcaaccggcgaagtgaggccaaacagaaggcccccgccgaggacatcgacgatggcgatgatggcctggggttccaggagcttgaggccaccatcgccaccgtcgatgggggagcgtgcgctcacgtttctcgccggagtctcaaggccatgaagcgagagcttttggccgcagcccctacccatgaggcgacgcggcgggcgcggtggtcagaagttgccctcaccttcgaccagaccgatcacctgccgtgcgttgcccggggaggacagatcgcgatggtggttttccccaccgtttgcaacgtgaagttggggcgtgtcctcatagacgggggtgcagccctcaacatcctttcccccgcagcctttgacgacatcaaggccccggggatggtgctccggccgtcccagccgattatcggtgtgacgccggggcacacttggccgctaggtcatatcgacctcccggtcaccttcggtggatccgccaacttccgcacggagcgggtgaacttcgatgtggcggacctcagtctgccctacaacgcggtcctggggaggcccgcgttggtgaagttcatggcggcggtccactacgcctacctccagatgaagatgccgggccccggtggccccatctctgtccatggcgacctcaaagtcgcgcttgcttgtatggagcagcgcgcggaccacctcgccgcggcgtccaagcccgagggtggtgacgggaggctcagcacctccgtcccggccgccccgaggcagcggatggtcacgtgcgacgaggtcccggtcaaagaggttaccctgggcgacggcccgtccaagaccacacgaatcggtggtcttctggacgacaaataggaagacgcgctcgtctccttcctgcgggcaaacgccgacgtcttcgcttggagaccggcggacatgcccggggtccccagggaggtgattgagcaccgtctcgccgtgcggccgggcgcaaggccggtccggcagaaagtgcggcggcaggccccggaacgtcaagccttcatccgcgaggaggtggcgcgacttctggaggccggattcatccgtgaggtcatccatccggagtggctggcgaacccggtcgtcgttcccaaggcgaacggcaagcttcggatgtgcatcgactacaccgactttaacaaggcatgtcctaaggacccttaccccctgcctcgcatagatcagattgtcgactccaccgcggggtgcgaccttttgtgttttctagatgcatactctggttatcatcagattcgcatggctagggtggatgaggaaaaaactgcattcataacccccataggaacttattgttatacgacaatgcctttcgggctaaagaatgtaggtcctacttttcaacgtactactcgaatttctttgggtagccaaataggacgtaatgttgaggcctatgttgatgacttggttgtgaagacgcgcaaccaagagaccttactctcggatctagcggaaactttcgaaagtctccgctccgcccgcataaaactgaaccccaacaagtgcgtgtttggtgtgcctgcgggcaatcttctcgggttcttggtctctgcccgaggcatcgaggccaaccccgagaagatacgagctatagagcggatgcgcccccccagcaagcttagggatgtgcaatgcgtcaccggctgcatggccgccctaagccggttcatatcgaggctgggagagaaggcactacccctatttaagctcctcaaacgctccgggccgtttacctggacggaggaagctgagcgggccctcactcagttgaaggcatacctcagttctcccccagtcatggtcgccccggagccagatgagccgttgctactctacctggcggcaacaccgcaggtggtcagcgcggcgttggtcgtggagcgcgacgaggacaaccctcactccgcgcatccccaccctatgtcgactcgacctgggagagagcagggaggagaggcccccgagctgaacggtggcccaaggccccgacggccggagctggccctctgcccgcttgtccgacggtgccaggcgcccccgacccccaggatggccccggggccactgcgggaaggccgcgcctgtcgccctctgaccccgaggtcgtcggcacagaagccgagtgcgccccacgcggcctcttggacgaagagcgccctggagatgcggcccctagcgaagaggatcagccccgccgaaaggtgcagcggcccgtctacttcgttagcgaggccctccgggacgtcaagacccgataccctcaggcccagaagatgctttacgccattctgatggcctcgaggaaattgcgccattatttccaggcgcatcgggtcacggtggttacgtcttaccccctcggccaaatcttgcataacctagagggtactggacgggtggtgaaatgggcaatcgaactctctgaattcgatttgcactttgaaccatgccacgcgatcaagagccaggccctcgccgactttgtggcagaatggacaccagctcctgagcccgtctccgaccccgaggccagttcgggcccctcgcagttgcctcacaccgcctactgggtgatgcagttcgacggctccctgtctcttcagggcgccggtgcgggggtcatgttgacctcgccgagcggagacgtccttagatacctggttcgccttgactttcgggcgaccaataatatgacggagtacgagggactccttgcgggactcagggtggcagctggactggggatccgccgcctcctggtgttaggcgactcccagctggtcgttaaccaggtctgtaaggagtaccggtgctctgacccgcagatggacgcttacgtgcgccaagtgcggcgtatggagcgccattttgacgggatagagcttcggcacgtgcccagacgggataacgcggtcgccgacgaaatctcgaggctcgcttcctcgcgaccctagaccccaccgggcacctttgaagaaaggcttgcccagccgtcggcgcgccccgaccccctaggggagacggacgcgcctgaacggcccccgaggcccgtcggagtccaggcctcgggacccgaggggagcgctcccagctcccttagattgattgcttggatcgctgagatccaggcgtacctcgcagataagactctacccgaggaccgcgaagggagtgaacgcgtccagcgcatctccaagcgctacgtgctggtggaagggaccctctatcggcacgcggctaacggagtcctcctgaagtgcattcctcgggaacaaggcgtcgagctttttgccgatatccatgaaggcgagtgcggagcccactccgcctcacgcaccttggttggcaaggcctttcgccagggtttctattggccaacagctctcaacgatgcggtcgacctggtccggcggtgcagggcgtgccagttccacgccaggcaaacccatcagccggcacaggccctgcagaccatacctctttcgtggccgtttgctgtctgggggctcgatatcttgggtccgtttaggcgggccccgggcgggttcgagtatctgtatgtcgctgtcgacaagttcactaagtggcccgaggcttatccggtcatcaagatcgataatcactccgcgcttaaattcatcaagggcatcactgctcgatttggggtgcctaaccgtatcattacggataacggcacccagttcactagtgagcttttcggtgactactgcgaagatatgggcatcaagctctgtttcgcctcccccgcccaccccagaagcaatggccaagtggagcgcgccaacgcggaaatcctcaaaggcctcaaaaccaagaccttcaacatcctcaagaagcacggcgactcgtggatcgaggagctgccagcggtgctctgggcaaaccgaaccacgccaagccgagcaaccggggaaacgcctttcttcctcgtctacggcgcggaggcggttctcccatccgagctcaccctgaggtcccctcgggccaccatgtactgcgaggctgatcaagatcagcttcgcagagatgacctcgactacttggaagagcgaaggcggcgcgcagccctccgagccgcgcgctaccagcagagcctgcggcgctaccatcagcgccacgtccgggcccgatcactctgcatcgacgacctcgtcctacgccgcgtccaaacgcgtgctggactgagcaagctctcaccaatgtgggagggtccgtatcgagtgatcggcgtcccccggccgggctccgttcggctggccacgggcgacggcacagagctgcctaacccgtggaacatcgaacaccttcgtcgcttctacccctagtgggggtcgggtgtcaggtctcgggctcgggccaacaccgcacccccccgggcgtgcagggttggccgggggctaccacatgcataagcttatattttttctcttccgtatttcaataaaagcattttcgatttcctaaggactgtgtctgtgccattgtttcctttcgaagaatcttggcttgaattagcacgctcgtgctcgatcctgccctcggtggcccgggccggctaaaatcgccaaaagtggcccagaagcgagccgtgccccggggcgtggtgaactccgggggggaatcggcaaaggcccacaatcgggtcatccataaccctcggtcaccacgttcccggcctggtcagtctcgacacgtggatctccccaggcactagccccgacccgcgccatttgaggctgggacctgggcacgagcccttgttcaagctaagacacagaaggaccgtgacacagaccatcctcgtctcatacacacaacaaatagaattgacacagaaatttcctctttatttgattgcagattaaattagtctatacaagaaaggggcccgaaggcctcggaagaagaagaaaaagctatttaaaattggcgggggcctgggggctcacttcgacgcgcccgggccgcaggcctcgtcgtcgctttcgtccgcaccaccgtcaccgccctcctcgtcggagtcgagggcgaacgcgagccgaggggctgtaccctcgaagctgtggacgatgtggtcggcggcgtcccagacctgcgcgcgcgcgccgtcctcggtcccgggagggaactcgtccagcgctgcccacggggagaagtcagggtccctggcctggtagcttgccagtacgagctccaccgctccccgggcgaggtccctcgaggatgacttgatcgtctcctcgagctcctcggggagccgctggagggtcccggccatctctgagaggcgctgggcgaggcccccctggttcgcggcgtatttcgcggtccgcccgccccagaggcccgcctgccgcccggcgcggtctagacgggagacggcgtcccgaagcatgccgggccctacctcgcctgccaagcggagggcctcgacctccccggcggacgagtccagcgcgccctgcagatcggcaatggtgtgttcggtggctgcgaggcgggcggctaggtcgccgtcgcccgcggccgccccgccgctgcacgctctcgcgtccagctccttcacccgcgcctcgagctcagcggcccgctgatccagagcggccctctcggcgcgggcgccttccagattgaggcgcgcttgctcctcccgccgctgcgccgcggcctcggcctcctcgagagctcgctcccgctcagtgagctcgtcctcgcggaggcggagtgcggactcctcttcggcgcaggcggcctcgtgcgccgccagcgttgcctcccggatggcgacggcggcctcgcgacccaccagttccttctccttcatgtccagggcgcgggcgcgctcctccagcaccgtggcgcgagcctcaaggtcctcttcgcgctgccgggacgcgtcgagcttcttctctagctccgccgcccggctcccgtattggaggcggaggtcgtcccgcgccgcgttgaaaacggtggtggcgatgagggcagtctcccgctcctcctccacctccctggcgatctccgccaggtccctacgacgggcctcgagttctgaggcgtgccggcggtgtgccttgcggcccgcctccaccatggcttccactgagcgtcgcccctcttcgacgcgcgcccacgccgcatcgacctccgcccgctctgcctgcaggacctccatctgggcgcttaacccgtccaacaccgtggtgttcgcggcggcaaaggcctgcaggaggggctttgtgctcagtggggcagcggaaggcggaggggagagccgcctcggtgtgggtgccgcgcggctcggcccgccgattgacgtgccggactcgggggcgtcccccgaagctggctcgtcctgagcgtcgcccgaggggtcgggcccgagcggtgcgcccgcggcctcgtcgtgggtggcctcggaagtcgtcgtcgccttgggcggagtcgggtcgggggcttggcgggccgcctccgtctcccggacggactcctcggccgggcggagtctggcctcctcccgagcggcttcctcggcctggcgaacccggacggcctcctgggcagctacctcggcttcccggagacggtctgcggcttctcgccggtcagcttcccgcctccgggcctccgcggtcgccgtctccccggcctcagaccggccggacttggaatggcggagggggcgcgacgggatctcgctgaggcagaagaaaaaccagaagacaaaaagaaacgggtgagtgaaaacttgccttgggagatgggggaatgaatacggccgcagtgggcgctgggacgaacctgcgaggaggtcggctaaacgaccaccttgggggggagatgaggtttccccggcatggttcggcccccccatcttgcggagccgcttcttttttcgctccccctcgggctgcgacgtcggcacagcaccctccgggcgcctgctgctggcacgcaccgccccgccccctcggggaggaaatggggagggggtatcctcctgtttcctcttcccccgggcgtcggcagggcggctgccccccgggcccccgtcacggggcccagaagcacgaccccctcccggggtagattgttcccccctgcggctcccgcccgcgccatcgtggcctcgaggagcccgctcctccgacgccccgaccgcctgcatgatggttaggatgttggcacgatctggatcgctgcagagggggaggactccttgggggatgagagatgcctccacggagctgaggttcagcacccgttggatcaccatcttgaagtcttcagggacccagtcccatttgaccccttggtgggtcctcatgtagtcctcggacccggtgtactcccaggcgccccgggcgcgccgctggagtggcgcgatccggcgacgaaggtagtcgccgtacaccatggcccccgtgagcccctgggatcgcagacccgccaggcggtcaagaacggcgtcgtagccgtctcccagatctaccggcgcctgccagctggaggcctacgccgggggctggctcgggagtcggaggcgcgcttcgtcggcgaggggggtgtagaaccagtcgctcttccagtcgtcccacttcttgcgaaggacgcagggaatgtagcggttcagcaccggcccccgcggctggaagtagcagccaccgactaccgacggtggcgacaccggctgaacggtgaagaaccaccgaaacagccggagagatgggcgcaccccgatgaacatctcgcacaggtgcgcaaagatggccaacgtcattaccgcgttgggggtgaggtgcgccatctggagatcataaaactccagaacatccatgaagaaattggagaatggcgggaccagccctgccattgcgaaagaaaggaagaagacggaccgcgccgggtagtgtggcgccgggcgtcccttgcccagcgcaaccacctcctggccggtggcagattccggcatgaatcggcgcggcagcctagcctgcctctcgctcacgatgcgagaaggcggcagcacgctaccgtcgagcggtgcggagccccgtgccatgacgccggcggaggaggggcttgagagcgagtgagtgcggcgagggtagggcacaggaaacgagaagttagagcgcaagcggcgaaggcaaggggaataatggcgagaggaaggaaacgaatctcttcctcggcgtctttatacccttgccaacgctatgcccggctcctcgcttcccgcgcccactatctcgccccctcgtttctcgcgcccacgcctccactaatcccgctcgcccgtttgcggcgcacgaggcggatgtgcggccgtggcagtcgagatgggacatatcgtgcgcgcgttaactacgctcgccgaccgatgcaccatcatcacatctccaggcgaaacgaaccggctcgtcccgattcgcgcgctactcaagtaatgtagcggtcttgaagaaagccgctcattattgtcggtcggttttcccttgccgatgcgcgcaatttgcgaccgctggattcctgcccgcctatagagaccggccccacctgtcaccaggcctaaggagtggcgtcacgcccgagcgctttcctcgaggagggcgatcgccctggcataacgccgggggctactgtcggtgacatgggaccgagggtatcttgactagaggtttggggcagccgcggtcacccacgtggcttgaccccctcgagggggtcgggcccgagggtgacgtggccgtccctccctctgtctccccgaggggtcgggccgctcccgtttcggccccgagggctggggcgccccgaccccctgtgggtttggcgccacgtgtgtgggttaggtgagcacagaggcgctcacctaaccgcatttatcgcaggttggacgagcgcgccacgccgcatttaatgcagtgcaatgcgcgctcgaccagtccgtgaccggtcgcagtgagtgaccggtcacagaccgatcagatcgcgggttaggtggcaacaggcggcctgtcacacgcctcgccccgtcccgtcgaaatgatgagagcctccatgctctcgtccctagccggagctggcgtgttaacccctggatttggcacgtcagtcccggccagatacactccaggcttcatcgcaaccattgcaaggaagtcattgtatgaagaagggcagacgtgtggcatgctaaactgacgcgtggtggacaaggatgaccggtttgtgactggtctgacgccggtcacatcatcggcagacaaccgtgctcccacgttgcatctgcttccggcaaagtggaggtaggtatgacccatcccatcggagggtcattcgaacagcagccattgcaaatctccgcccattaatgaaggaaggacagggttgtccccggtgtcaagcgaaggcgcgagccaagttttggtcaagatagggtgagtcctcacccaaaagaagagtaggtagaagtggtgcatgtggtatccccttgagatataaaaggaggaccttgcccacttaagagaggagactctcagacaactcggagaacacctgagcttgtagaggggagaaagagaaagaggaagagggtttctagagcttgaactctcttactcttcagctctttgtaactccttcatacacagatccaccagaatacaggagtagggtattacgcttctcagcggcccgaacctgtctacatcgcccgtgtcttgtgcatttgctctctcgcgaaacattccacagatcgagggcttagaacctcacctagcgcccccggccgaaccggcaaaggggggcccgcgcggtctcccggtgaggagccccacgctccgtcaccaagtataacagaattaaagaaatgcaaatgaaaagatgacacaccaacgtcaaccaaaggaaaaaaataatttatacataactgaaatctattacaaaagctccattaaaagttgacgaaaatttacattaaaactaagtttagttctttgtttaccatgtggagcaaagaaagcaaaaaaaaacattcatctgaaaactaaaacagaaagcataatcaagaacaaaagtttccttgaggatcctgtcgtaaaactcccattgtaccattgctgcagcatctatccagatctttcaaggccctagtctgggcccttgccgtttccaaaaaaaaacaaaagaaaaagaaaaagtttccactgcttctctttacttaccctatacctcaattactcttgccttagctcggccaaaaagttaatcactatccccaatttgttccgatttgctttcacaggttgctttctcgcgagtcgcgtggtagttgccttgctgcgaatgccggtcgtagtctcgtgatgcactgatgcatgtgacggaaagaaaaggagtgcttagactgggagcataattgtacaacagcagcaggcacaagcacaagcacgcgcaccctctcggtttttattctatttgaaggagtttattccgaaaattaagcagctggttagctgcttaaccaccatatgagaatctaggttttagtttattttctagattttatgacctcttgtttattttttatattttataaactatattttttctagataaaatgctatacttctcggagaaattgctgccataaaaaacactccaagcaagcatcggagtacattagagcagctcgtgtgtggagaaatcgaaccgtgaaccaaaaatatcgaacacagcacactgggagagtcgatcgttgtgtgtcagatagcagaatcgacctccaaacttgagtcgatgttagacaattaaagtattatttgttgctgatgggtttgaacacatccaagccaaatcaaataatttataattttctctcaacttttcttactgtaagtgggtcccataaatcgatgtgcacactgcagccatcgaaccaaagttgcattcgccgttcacggactacaataatcgaacatacactggagctgcccttaaggggggcggaaggggcgagcgaggagcggtgccacgtcaggatttcactacagtatgtgcagtgtgcgtgctggtaaattttcaaaaacgtccttcccttttcatgtaattcgatataggcccctctctaatagtacatctgagacgatattttacgtgcagacccttctaaaagccgtatattccatgcaaaggagagaaaaatcgcgaattaggaccgcgatgtcaaacgtgaaacccaaggggctttttagaaaaataatgcgcactaacccagccccccaaccctagccaccgccgccgcccgtcccctcctccctctcgtcccaccagcgctctccctctccctctcatgccgccgccgccgcctccccctcgcgccgccgccatcgccgcctgcccctcgcgccgccgtcgtcgcgtccctgtcaccgtcgcctccacctcctcctccctcgcgccgccgtctccacctccgctgccgccgccgtcgcgttgccatctccgagctcctccgcctccccttcgcatcgtcgctgtcgtcgagcggtggtgaaagcgggccctacccaccacaaaaccatagccgccgccgccggccacttcctcttcttcctctcgtctaaccctctctctctccctcttcctctcctaccgtcgccgtcgcgaccgcctcgcgctacctccgcctccacctcgtgccaccatgtccgcctttccctcgcgcagtcgccattgtcgccttgcgtcgccacctcttccttcccctctcgccgccgcctccacctccgcggcggcagccatcgccttgccctctccgagcaccttcgcctccgcctctcctctgcctgcgaggaacggtgcctcgccgtcgtcatcgccatcgtcaacctgccgtcgtcgtcaccgtcgtcattaacttgctggtctagccgctccccgccatcggagcggccggatctggtggccacgacctcaaggtcgtctaatctgatggtggcgagctcgtcattgccggttggcggttgatggagcgacgggaccaaatgctaacccgcgcttccagggcgtggcaatccgacagctctacgtcgaggtcaagcgggtgttcctgtcccaacctcctgcgcatccacgcccccgtcaaaagatctgcggtgaactatacccctccccttccctctctagctgatttgggtggcgcccctgttcgatttggcttgtgagggtttgcgtattttttgtgtgtaattgcactattctgattgccgatgttgggtttgtttagggttttgtgtctgagctgctgcgttcatgggccgattaagggcgaatgctgtgtacctgcctctctggttcgtagctaatttgcgccaatcccgatggcgttgaagtcacgacctatttctgaaattagtttttgtcacgatttattttaaaaatgagttttgtgaaagggtcaatttgtcaaaatttcggacataactactccatccttagcaaaatataggaacctaaaatgagataaaatattttctactagtagaaactagaacctaggtaggtagtttgttaagatttatagtaataaaaaatgtctcattcaatcatatgttcttatgatgtctcatccaattctagatttttatattttaagacggatgaagtacttataagccatgaaaagagatcacatatactccattcgtcctttaaaaaaacaaacctagaattgaatgtgacacattctactacaacgaatttggatagaggtatgtttgtccagattcatagtgatttggctttgtcgaatttggacaatgatgtaatcatactagtatgtgtcacgttcagtattacttccttcgtcccaaaatgtatacatttttaagatcggcacgaatattaagaaattatgtgaaaatgatgggagaaagtgtgtgattggttgaaaaaagaaagtaggtgaaggagaatggttgttattggttgagagaacgaagtaggtggagaaatattttcattttgggacaaagcactgtgttagaaattttgacgtagttgacttttttaaacacgtttgactattgtcttatttaaaaaattaagtaattattaattcttttcgtatcatttgattcattgttaaatatactttcatgtatatatacatatagttttatatatttcacaatatttttttaataagacgaacggtcaaacacgtgctaaaaaattaacggtgttaaacatttagaaatggagggagtatattttagtacgtaggtagtagattaattttttaaggagcacgtagcacgtaacagttcacacgtccttttgtctctgcatccataaaaaaccaccagatttgcaaaacgatcgagtggcctctgttgcggctacctttccttgtacaatcggacaagctcacaagcaccttttcaagaatcatcatatcatctcaagatcgacactagaagtacactcccagtgttcctgtgaagaagaaaaaagaagaggaaaaaaaaaaggactggctaccatctgcttccaaaccattttcacggatgtatatgcggatgatgcatgcaaacgctagatatgagatagtagtatgatcgatctccatcacctattattcgtcttctttggtggttggtgcctgtacgtattaataaatttctggtacaagaaaggcacaataagaagcacattcagaatagtgacctgcgcgtgtatggactaaaataaacgatttgatcgatcggtttaattggctgaggtccacatccctgaatgggatagcgaaatgcgctacttgagtacttgactcgccaacactttcatctgaaccgttcgatcgatttctacatgatgtaatctaactaaatctttacccaaggctagcgctgtctatatatcttacattacttccatcagtttctcagaacctcaatatatatatatatatatatatactagaaaataggcacaccatttggcgcaccggtagtttatatcctgtcgatcatctataatgtagcactcctttggttcaacatatttgatcaaccttatgagattttgaccttcagttttaaatcaggaaaagcttataaattttgaaatactattgatgaccaacgttttggaagtttgatcaaattgtcattgatatttcggccctcataatggactttcagttgtgttttatgtgatcagagtggagtgtctggctttcatgaacttgtttttcaaatgtgcacatgactattgccaaaaaaaattacatatgaacatttagaattttaagagttaagattgcctttttattttataaatatatgtatatacccgtaaaacagaaattatatgattttttaacgcaacagaaaacaccaaaattcaattaagtaaatgaaaactttaattgtttcaatttattttgagcatgatttcttttctaggctttgagtgcctagagcatttggctttgaccccgccaactcgtcctacgaattttaccctggcaactccaagcaacgccagatcctccatactccaatcagcctgatccgccgtcggaggacaagcacaggatcatgaggtcgatcgtgagaggtgcggaagtctagcaaagggcgtcactagcgcatcgaaggatgtgcctataattgacacgggaggccatgacgaagggcgcggtgatcgtcatcgcgtagtcagatcccgcggtggacgacccaacgataaccattgccgattagggaagagttgttttctttttaatctcgccttttatctcctctatcgtgggctttgctgggtggtgggcagattgttagagttgatatgacaaatttttatccttttttttcgagaaagatcgacgtggagactttcaggtggagggaaaattgtagttcttttttttcctttactcattttttacccatggctcatgttttgccatgtgtcatttaactaatgagcagtgaaatcaaccaatcagcttgccagaaaccggccagcttatatggatattttttgcggggttagaacctcaatatataaatgaaagggtagtgaaaaataatctctgtctatattatatgattgggcacttttaaaagcactcgtgttaaccataaggatctaaacagttaattagatggattgtaatatcataaccgtatatttagtgaactctgtaattttaattcggattgagcactcttagtccatgattatgtactgtcatagactatataaaacacaattaatctccatataacaatttattactttgagtgagttccaacataaactagaaagatttaaaaatggtttgggtgaatcataatttcatgactacatattgttggtaatctgggaatatggcaaaatgatttgtttgatggtaattcattcttaccattttgaatgttttgttaatggaaaaatatgagtatgacaatctacttctaagttttagtgttagagcatattttaagtagataaaatctgaaagacttagataatagataaaatcatgttttgcttataattgataacaaaacttaaaactagtagtaagttataaaaggtagtagtagttggtacacaacacaaatttgagttaaattcctatactgacaagctgctgctgcctactaagtactatactaactgggcataagtatgaaagacgataaacactaagcacatatttcacaatcctaagaagataagtaagatactaagtattatcctaactgggcataagtgtgttaagtatataagtgtgttaagtatgaaagacaataagcactgagcacatatttcacaagcctaacaagacgagtaagaggaactgatattgctacggttggcaagaggaactgatgttgctacggttggagcacagaaataacaaggacggttggtaagaggaactgatgttgctacggttggtaagaggaagaggaactgatgttgctacggttggagcacagaaataacaagggcggttggtaagaggaaatgatgttgctacggttggtaagaggaactgatgttgctactgttggagcacagaaataataagggcggttagtaagaggaactgatgttgctacggttggagcacagaaataacaagggtaaagagtagctgtgatgtaaagagtagcttcacagtcgcagacagttgtagtgcatgaaagaggggttgtataattgtaagtccccatgtagcatcattatttgtctcttgttttactaaatcaatttgtaattgatagattacgatttagtatttgataatagaaacatatcctatgcacataagctttatcgtgtacacaatgtgcatacagcatactaactaataattttcacgaaaaaaaaatcaaaagtaaggatattttatagcttggcaatatgctttttttttgcaatatgctttttttgttttggaagagagtaaggttgtccaaagagagatcacctcggtccaacgtgaatatattggtttaagagtagtccaaagcgaaacatcgataataaaaatgggcaaagtaaaataattgacacacatatgtcactaagtaactagaggggattagagggaaggcttttactgtgggtaggagattaggggtgggagtatagggatgcacgtgggccgggctgggtcgatccactatcacgcccacgttacccagggtaatgaattacaggttacgggtcacccgcgacccatgcatcggtcctgcactactgtcacgtccacgttacccagggtaatgaattgcaggttacgggtcacccacgacccacgcatcggtcctaccctgctgaccccactatgggtcaacccacaaacggtgccactatgtgatctgcccattgacgcaactagatcatcagtaaacatatttattggtgtggtcgaatattgatcagacttgaaattacttctataaatatcactcaaatattgaacaaagattgagcagtaaatatttgatatttcttttagaagtcaaattagatattcaaagtacattgcaaaatctgaaaaccttcagctattagtgtggtcagcagtcactctgtaactgaagaacgattctcaaaaacatagaaaaaaactgaagaacaagcatatcgtacagtataacatcaagaacaaaagtgtccttgttttgcatactagacgaataagtctcagaaagcaaataaaagaaatattgcaccacagcgatcgagtcctatatttcatcaccgtatgctaacaaattttgaatcacgcctcaaaaaattagatccttcccaatttcttaattcaaagtgaatcacgcctccaagcatcgatgcatgttgccagttgggaggttcgtcgttggtggcggcatgacgagagtgatggtgggtgtggtgctgcaaggtggagcatcaggccatctgatccatccccttcttccatggtagataggggtaggaaggaggaagggagcatccgattcatcccgctcttccatggaagacagcaatggcgaaggggcaggaagggtggacgggcagaggggcagagcgcgacgcggcaggcgagcgaagcgccggaacatgaggcggcggcggcgcagctggtgcctagtgcattgtgtaacctagctagatgggtcggcccataatgctccatgggtcactgtgggtcgacccatcatgacccatgaaatttcatgggtaagcccatgaggttttgaccccatgtttcgtgagctgggtcgctgggtagatgggttgacccggcccacgtgcctcactaggtgggaccgcggcaggcccacttgtcgacgacaatagcttcttcccctcttcttcctcttctttttttctcttctcctttacttcttattcgcgccgagcaacgcgccggctgacaaattatggagtagggcgtggcctaaggcgatgcggcaaggggttggggcatgggtggcacaatggtgtcagacgatttcgacaacatgacaagggcagcaaggatgggactgatatgcagcgctggtgacagggagtccttagggatgagctagggcatggagatggtggcacgatagcggttggagtggcaacctggcgagattcatgcggacgtgagttggcgggtgttggtcggagtgattcaaggggcacgacaaggcgtggcagtgacggtgaccatagtgacgcatgtggactcgatgcgacgcaacgaggaaggcgagaacaacggctagggtcacctacgcccagggcatggttgcgagcggcaagccgacgtggcggcgtgaggcaaggcattatgtgcaggcggcatggtagtgcaggatggctggggtggcggcgggacgacatggcaagtagggcagttgccggacccttgtgtgacattacatcaagcatgtcgcgtgagagggcggctggccatgtggggcagaagggagcccgacgccaattttttcattttttattttatttattaaaatatttaaaaaataattttttttcaaagaattatagatctacactctaacgccctatgttgaaaaaacgctcttccagagagcgtttttgtgacgtggtgggtctaaatgcaaaattaccgtatagttcgcctataacagttttatacaatttgtaaataagtcatatgaagtcggataaagtcaaactttatatgaaaattatatacttcaatgagatcatttgacaaccttttcatttaatatcacttcgatatctaaatatccattacaaactctcatagttatgttcacaaaatcttagatctacgtttcaaatgacctccgatgtagacaaacgctatataaaagttgtagatgacgatgagatttataactttgtagtagaccacttttcatgtaaaattattgtcaaataggaaaaactagtttcgtagcattgaaaaattgctttttaaaaatatttgtatttacattaggccctacgaaactagttatgcatatttaacaccgtaaataattttttgtgaagaattgatcaactacaagggtgtagatgccgtcgtgttaatcaactttgatatatcatttatttccatcggaggtcgtttgaaacgtagacataagattttgtgaatatagctatgaaaattgtaacaaatatttggacatcaaaacaatattaaatgaaaaggttgtcaactataaagttgtaaatctctacagtttaaagcatggctttatccgatttcatatgacatatttaaaaatttcaaaactatcatatggtaaactgtacgacaatttttcgtttaaactcgtcacatcacaaaatcgctctttgggatggtgttcttttgctctgccggtgccaagggcagcttgactgcagaaaggagtctaggggatgacgacaaccccgggcggcaagcgaggacggcagttgaagggctcagtctctgcctctagctcaagcgttaagaacgagtggcgttgggcgacagagaagatggcgaggcgacagtgacaacgagcggtgtggtggctccccaatgagatcacgctcccctatgcaaagctcgctgccgccaatctcatcatcctccgccaaacaaagctcgccgccgcggatcacgtcgacctacgccgcgtggagcttatcgcactccatcagttgacctgcccactgtggtcgcgaccagttccaacaagattgcagccggatacggcaagctagatatccttgtcgctgctgtgggccctcgaccatcgtgaggagagaggagagagctcgagctcgtcatcctctgccactcggagctcgaagtcgatatcgtcgccctccacctgggagttcgtcagggagggtataggcgacctgatccacacacacacacagagagagaggggccacgccgccaacgatgagagaggcggcgttgccgctggcggtgagcggagtgggaggggaggcgtcagtggcgtctcgtcatttgctggagtcggtggagaaaatgaggtggggaggggatgagagttgaagaagggagaaaaataaaaaaattccatgtcatcgtccacgtgtcatgcgtaggtaaatccatggtcaaacgagactttggaccagaatgatacattaaaccaagtttagatatatcgatgcgaattttgtaagttcgtagacttaaatgaaccccgtgataagtttaaggactgctagagtgtaatttactctttaaaaattaacggtggatacttacttatttagaaggtacttgaggtacctttcaagcactgtaaaaggcctcctgtgcaagcagacaacctgtacgtgcagaatattctttgaccgaggacaacaaatttcagatttgctagatcaattgcagcagttcatttcctgatcgttagacatagagtgattgtgtattttttttatgtgattggattgaaaagcctgcctgaattccgaacatcacttgtgataccatggtaggggtgcttgtggttgtagtggacaacttgacattgatttgtttttagaactttagtgcacttcgttggcgagaggagaatctgaattctgaacagcactgtacaggtactaggagcactacattatattgagagtgagcgaaatgaagatgaatactttgaccgagatggcgatgtgtttaggaaggaagagtatcaatggtgtaatcaactagtgttagaggactttctaaagatgcataaagaaattgaacaccgataagtgcatgagcaacttcgagataaccttatggagcatttgtgaatgcttcgtggcgttcagtagtttgtttcattatattttgctattttcatgtttgaaaattttgaatttgaatttggtttgtgggggtttcaaactgtaactttgaatataatcgaaatccatgtgctaggaatatttatgttttaattattgtggtcttaaactaagcataaacatagaatatattaaatagaagagaaaaagaaatagaggctaataaatgagggctgttgctagagttaaatgtatttttaagatcttacataattaggggtagacctcatttctcttttaggggaacctcaaaatttgagagaaaaatcgaactgcattaaaaggcctgttcttgaccatcccaataaaatctaaactgagctagaagaccaatagcccaataaaatccaatccgatgatcatcccctcgtgagcctcttcatccccagataggagtaaaaggcatgtccttgactccttgatccaggaggttcttggttttttttttaaatgcatactcaaaatacatagtatatatacatattttttttcaaaattcctagatacacatctgaatacacttgaattgaattgaggtgcgaccgcccctgcctatatacactcaatcttgaaacttctactgtggcaaagctactaaaatcaccataagtaggggatataggactaatcgggctccttatattaatagagaaggtgcccatgttattcaataccctatattacacagatttacgcatttccagatgctagattgctgacatccccaccggatgcagggtacatcgcaaagttttttacataggtgtcccttaaatatgacgttgtctttagcatcagtaagtaggcaggcgtgataataatggctgttccaatagctggccagattggcatgttcttggaacagtaggttacaagagaaatatatactggcaatatcatcaccatgaaaaatagctgcaaaacgaataagagccaaacaaaaaggttagtaaatggaaacaagacatcactgctacaataaaaatgctaaacagacaggaaaaggttcacatggttaaaaaaaaatgcacatgacgatgtaatggcgaatttcagtagcagttggtagtggacaaacaaaagaagtaaacaaaccaatacatttgatttattctatcaacagaagtcaatcacatggcagcataactgatgtcaccatggctactacggacataaccattgctcacatcatggatgaacaacacgatatcgtcctccaagtgctagaatccgattcggccaccagctacactgttgatttcaaatgaccgtcgaatctgcatacgaccttcgtttttggcccgtgagtacttgatggaaagctctcggagccctctttccaatggatccagcctcatcaccagattctatgtcatttggccgcaatcacataaacaaggtgctgcgtcacctgtcttgggcctctgagcttgtaactttgtttgggaccccggcccaagtggggcccatgtggggtgcggcccaaccaggtggaggatgacccttggcaccccttggtcgtcctcccacccctataaataggtaggtaccccttcaggacttcttgggttttgatagattaaagtttagccattgctacttgcttgcagcgcgcgtgtcggctagaccgtccgtctgcttattttttggaaccctaacttatcatttgtattaaatttctatttgcaattcagattgcttttatcttgttcttgcttgtttcttcgatttgcttgtaggaataagattgatctgcaccggcaagatcaacaacccacggagaagtgtatcgatcgctaaggcgcaacacaacgtctcgtacggttgtagtcggatcgtcaacgtttcttccaaatcgtagttatcacaattcaccgaaagatcggcccaaacaacagccttgagtgtcaagtgaaactcagggttcatcaataacacaagaccaaaacaaatgaatgaaagaacatgtagcttagtggttgcaatgacctaagtaaatagcaccgtaaggccctgagttcaaatctctatataggcaaattttagattgcagtactaagttttcaatttaaatggctacatatatccagttgaatgtagaggccgggtaaaaaatacccttctctaaaagaaaaaaaaagccaaaaacaaatgaagactttaggtacggcgatcaaagtaaaagacatcggtaactaagactatgcgttttagaccaaggtgctttcaatagccaatcccgtactgtatatatgcggttttagaccaaggtgctttcaataaaaaataattctaggtgaacgcgttcagttttatgaagtcttgggttgcaagaagtccaagataacttgttttattttcatgtggtcaccagactgctatttgttatttttgagcagcatatgatctacatcagaatatggttgtttattcagaataggtttccaacacaaaggccgtgtttagattcaaacttttttttcaaactttcaatttttccgaaaaattaaatgtttggacacatgcatggagcattaaatgtagacggaaaaaaaacctcttgcacaatttgcatgtaaatcgcgagacgaatcttttgaggctaattacgccatgatttaacaatatggtgctacagtaaatatttgctaatgataaattaattaggcttaatagattcgtctcgcagtttacagacggaatttataatttattttgttattagtctacgtttaatacttcaaatatacgtctgtatacttaaaaaaataattttggaccactaactaaacacagccaaacttaggcagaaaactattctggtcgggacttcatgtaatacacagattgccttcttgctgtcagttcgtacggtctgcttctctattaaccacggcccaaagtcaaatttcacgtgcttagtttgggaaaataataataataaaggtctctgtcagtgggggaccgaattataacccagttttaggagattgctcggcccttgtttagttccaaaatttttcttcaaacttcgaacttttccatcacatcaaaacttttctacacataaacttccagcttttccgtcacatcgttccaatttcaaccaaacttccaattttcgcgtgaactaaacacaccctcagtgcgaagaataaacaacaggtttgcatttctagaggggtttacatgattgcaaagtgtggcttggaaatttgattgaaaaagaagtgggggatggcctgaccaccagtttttggaatgatgtttgggctgacagatgtcctctaaagatactgttccctgacttgtatgctgtgaactctcaacaaaatgccagtgtcagagatatctatcaggaaggggcttgggagctgagtttcagaaggaaccttaattaagaagggagagctcagttaactgagcttctctctaaaatccaatgggtagttctgaatgggggggagcatgataaggtggtgtggtctcatgctaagaagaagcagtttacctctagatcaatgtatagactcttgacttttggaggagtagtggataccgacatgcaggggacctggaggagtaaagtttctttgaagataaagtattttgtttatcatgcaggaagggggaggattccatgtgcctttcagttggttaaaaggaactggaagggaggagatgataaatgcaagttgtgtgggggctctgaaactcttaatcatgttttgttcaattaccctattgtgaaatttgcttggtgtgtggtcgaggaagttttgcacttccctgtgatccctgtctctttctgggaaggtttagatttgttaaaacaaaagttaggggggaagcttggtgtagtggtgtttgatagttggatttggggtatttggctaactaggaatgaatgggtttttagaataaattgcttaagtctcctttgcaggttgtttacaggataatttcgctgctacaacgctggaggctcattcaaagaagaaaagaagaggcgcgtttgcagcagcagattaaagacctgataaccaaactgcaacaactccgtccttcagggaggctgccagatgatttagactttggttaggagtagtttttatatgctgatcttgggggtgttagtgttttctgaatcagggtgtgggtgctctatgcctggttgctggaacttttccagtaacggtgatgctggtcatgtcttttgtccagtcttttctgttgtttcctttttcagctgtaaaacgtcttatgtgtatcctgttaggctttcgttctgaaggctgggtattataatacctgtcataaaaaaaaacaacaggtttgcatcgaatcgagaacagttttaacagaacagtcactctccaaattcgtggtaggcgaggcacatcagtcagagaggcgttattgcagtaagaaatttagtaaggggaatctggagagtgacttacacttatcacgttgaacaacgtttgattcttggcgccagcttcctcctcctccatctcgcatccctggcctttctcaagatcgacgaattcgacttgctttgtttctgggctttcctctagatcgacggatttaggaagctccatctaatcctcgtgagctagcttgagaacagattcaacccttccctctctgtctcgttcagttgttctccacgacaagacggcgagagctccctgcaaatcttataactgcgcgctatggcgtcttcgacaacttcgacctgatcagggtttccgcttcccaacagaaatcgccgcaagcctccgtttccgattcttagggtgccctagtttcagtagataggatgggctgattagccgcacgtaaaacaagaaatgtaattaacgtatgattaattaaaaattaatatatatatatatatatttatgaataaatttgttagattttttttaaacaacttcattatagaaaattttcgtatgaaatacaccgtttaacagtttaaaaaacgtgctaacggaaaacgaggagaatctaatcctataatctgaaacgtgcgcaccctagtctaacacaagggattttttggatggcctaggccattggagattccactatagaccggtgacggacgtggctaatgggtatgtacgcgctgtttgttaaagtggcggtgggtccaattctttctttttaacatatactagtaggatttaaattaaaacatttctttcacgtggaagtcaggtgttacacagcgaggctgtcgagtgggaccaaatctagctcacctttgacggcgcggggcgcccatcgatgtccctgctctgccgctcatcagatcggtgatcgccagaagtccgtcgccgtccgcctcacggtcgccaggacagccgcgaccaacgttgtgatgcttgcagctcgccgggcgtgttctagctgctagctcatcacggagcaggacgtactcgtacgtgcatccacaactacggcggtgtcacggaggacatccatccccgacatcggcttcaagctctagctgcgagacctacgttcttgaccagacctaccgcatcgacaacgtcgatcaacaagctcagagtcagcgccaacatgccgatcatgcgcccagctatatatatgcgtcgtctcacacatcttctccactgacactgctccatctccagcatctccagggccagttagagttgcttgaacttttgtcgctgggacctctgatcgtttacgcatacaagaatacacacggagtatatatatacacactacgtccatgggtgaggtagagttagtggtttgttgcttaacaattggcatggtcaattagtcgcataaaaaatatagctggaagacaattttgttttcaagttctgggactatgcacatatttgtgagcacataaaattctgcaattgacgtatcagcatctctaaaatgttccatagaactgcaaatagaaccgtgcattttacagtgtcgtaacattcaaagatcagcctagaacaggcgccgaccacagatactccagggagggcagcttgaagacagtggtggtcgaagcccaacaaactgtcattttttggggaaactattttcgcccctcgagggatacatgtccctcaaatagttatgaaaaaaattgaaaaaatttgagaacatgtgacatgcaagttcaaattcaacttctacattttgcaatgaaaaaacaaatttgactgtgaatatacgttaactagctatagtttaatttattttttccgttgcgagatgtagaagttaaatttgaacttgcatgtttgtggagtgatatatcacatgttaatatatcttctctttttttttaatttttctataactatttgagtgacatacaagcaacgagagaatatccgagggatgaaaatccactcctcatttttcgccaagcagagttcgaagcagttatcagatcgagttcgaggtagccatgaagggaaaaagaaaagagctcatcaagtgggccatccaatgtgatagtagagtctaaaccaaatcatgggataaggccggcctctgcatttcaagacatagttacgaatgaatcttaaaaaaatatcaaaattcaaataaaactagttcagcacacataccttccacatatcaaggatagatgcccaatgtttcagccaattacggcatagccgtagataatgcagtgctgatgtagtgtcgtcgtagcttatattcctcgtcttttcatatgccaacattcatgcccttaagtttcggcctaatcacgaatcttcagctgacacgatattgatgacgcaaggtaaatcaataataatttgacaacaatacttaacatcatcaatttaacttcctgcaatacctctctagctttcccaaactatctttgccaatgaaattaatgaatctttctgtataagcatgcaagtgtttttgacactccggggagggagctgtaaacactatctcctaatggctctgtcgaattatctttttcacatcttcccaaatatgctcctcctttttttcacctcttctaaagtaacctttttcattgcagacacacagatacccttatgaccttcacccaaaaatattacggggtatcgtatccataggaaacatgtacgaactagtcttctaactaaattacctaagtacactgttggcggttattaaatgccgattctataccgtcaacatctgcataaagtccagataataaaacatccaacatagtgataggtattaaatctcacatattccacaagtgttggtatatatttgtatgcaggtgatgaaccccgaagttgggagggaaatcagactaaagtgaggagaaatatgtatccatacaaggatgggttgtgaacttcatcaaaataccagagaatcagcccaaaactctgagaaatggacagaggaggaccaagagaggagagatgccgaaggccaggccaggagggcctagcccaggttcggtcgaaccctggtaagcgccgttagatccaggttttggcatggacgctccatatcactccctgatggtggttgcgggcagttcggacaattctcctccccataaccgtcatacctgtcctataaatagacctcatctcattcactctcacacacacttctaagcttgagctgaattataagaggctctattgtactatattgtatgctagaatagaaagagagtagagtagaaaaagtcggaagaattacagagttgtcggtaatcttctctcatttcttttattctgtttattactctgatttcaatataattatctttctgagtaatttagatttatcttgtgagaattatctctttgttagttcctaaatagcatatgggattattgttcactataattaattaaaatatagtgattgctttgatgggttataaatagtaaattagatattaattgcttagagataaatgtgggatcggctaagtccgagtcagactggattaagtgatacagccgattccgacaatacgacttgtatacgacatcgggtttgagttgatgtgcttcaagatgattgccatgcatggatagagtcctgagaaggcaattgtatctattaattaggatattttatgtaaattccttagatataaatgtgggcaaaaatctgccgcaaagacttatgatatcttagagtttattagagataagagtcgtgtccgatatggacatatattgtaattctcgggtataaatagacccgaaccccatgtaattgaattaacacacgttcaatacaatctcggcgcatcgccaccttttttactttcgttttgtttcgacgagttcttgcttttgggttgagctgcatcggtttcgatcttcaacaagaggtgaaacttgttatggcggcttgcgttctcgggattagtgcttccatctttatgatactctaatcttgtttatgtaattggtcgagttatcatatatcttacataatcttcgataatatcgttatctaatctacaatcggctaacatctactagtagaaggcagctgattaggttaaataacgacgttggcttagattatataagatatctaccactctatgaaacatccagcggcttgattgtctagatattgtccttctttttatacttatagatgcatcagttgagtttgatcttatgagtcgtgattagaatctcaatctctagcatgctttttggttgccgattagggtagtatcgtggtttcagccgatcttatctgatttaactatagttattctatgtgcttgattgacatgttaaatctgccctttatattaagatcttgtttcttttaagtatattaggcattggtttagtatattttacttgctttgatatcttaatatagagtggtatcggagtattagccgatacatgctagatctatctgatcggctatgctatgaacatgtatagtctcgttgttaatatatacttcgacctaagtgatttatactgtctcggcatggcgaccaatctatcccaatcacttgatttaagtatacatcgacataaagactatatattgttaatgtctacagccgattgagtagatttagttctttctcgcttattaatgactgccgatcgatgcatatatgacatcggctcaaagataaatgatatgtcatcggcacccagccgatcggctatcatttatggatttaaccacggtttctttttcttcgtttcttgttgattgcaggatcaaatcaactggcacgctcacgaacctaaaggcaagcttttggacctgcactggagttaagcagatctcccaggcctcatattttttcatcaacaatatatatatatatatatatatgtatatatatatatatatagcaaatctattctacaccccctccctcccatgggccaatcccacctcccccacccttcctagagcccaaatcccccctcccacctcagtcaaaggctggtcaaagcccccttccgccggtcaaacccgcccattgactccctcccccgtctcgcaggaattccataggtacataacggtcattgtgcagtaacaggacaactttctcgcagtaacaacattgaaaaatagtcatgatggatctagttttgttaagtacttttttacgaacatcatggtgtagacggattagaaaaataatatataacatgagagatattgctctctaaagattgagatctacttttttttagctctcgtctctttagaacaacgtagtaacgcggcgatcaatgtgcagtaacacgactactttctgcagtaacaacgttattaaagcatttttgtctcgatcatcgtgtagtaacaggactattgtctcgctgtaatgtcgttttaaagtattatggtgaaaacggttctaaaaaataatatgtaatgtgagagatattattgttcaaagattagaattctaaaagtttacttgtactaagcttttctactatgtatctttgtatggacaaagagaagtacttttagcacttgtgttaacttgtgaccctgtgcacttttttagcacttgtattttgcataatattgagatttaaaaaatttagctatgcacagtggtactgcagtagtaccgttactaccatatattctctgttactgcaatttcatcatgatgttactgaaaaagtgcagtaacgacttataaatttcgcaataacgtcctataattttcgcagtaacgtatcatgttactgcacttctgtgataatgttactaccgaatcatagtaacaagatatatttcatacaatatttgtgttcacaaaatttgaatagatatagagagaaagcaaacaatgatctaaattcacaaagtgtcatagggtgaattgattgggagagtttgttattaatcatgagatcacgggttctagtcttgaatttatcaatttatttttaatttttctaaaaaagagaaaatgataggaggaaaaaaaataaaagaagggagagagaaacgatggagagaaggaaaggcgaaaaaaaagaagagatcgagagaaggaaaaaaaggagaagagatcggaggaggagggaggcgcgaagagaaggaaaagagatcgagagaaggaaaaaaaaggagaagagagaagagatcggaggaggagggaggcgcgaagagaatgaaaagagatcgagagatggaaaaaaagggagaagagatcggaggaggagggaggcgcgaagagaaggaaaaaaatggagaagagatcgggaggaggagggaggcacgaagaaaaggaaaaaaaatggagaagagatcgagagaaggaaaaaaaggagaagagatcggcggatcggcgcctcagggggaggggggacacgagctaggaggggtggcagtgaagggagggaggggcgcgcgtggggactagggagaggggggtgtagaatagttattctaagggagggtgtgtagggtagagctgtcctatatatatatagcaaatctattctataccccctccctcccatgggcaaacccacctcccccacccttcctaaggcccaaaacccccctcccaccccggtcaaaggtcggtcaaatcgccctctcgccggtcagacctcggtcaaacccacccattgactctctcccctgcccaccactttgctgttcacatctctcaggaattccgcagtaacataacagtcctcagtcaaacccacccattgactctctcccccgcccaccactatgctgttcacatctctcaggaattccgcagtaacataacggtcatcgtgcagtaacaggacaactttctcacagtaacaacatcgaaaaatagtcattatggatctagttttgttaagcacttttttacgaacatcatggtgcagacggattagaaaaatactatataacgtgagagatattgcactctaaagattgagaattgctttttttagttctcgtctcgctggaacagcgtagtaacacgacgatgaatgtgttgtaacacgactactttccacaataacaacgttataaaatagtcatgatggatctagtttcattaagcatttttgtctcgatcatcgtgtagtaacaggactagtgtcttgctgtaatgttgttttaaagcattatggtaaaaaggttataaaaaatagcgatgcaagagatattattgtttaaagattagaattctaaaagtttacttgtactgagcttgctactgtgtatctttgtatggacaaaaagaagtaattttagcactttttgttaacttgtgactatgcatatgcacgtgtattttttagcacttgtcttttgcacgagattgagttttaaaaatttagctgtgcacaagcagtggtactgtagtagtaccactaccatatgttctttgttactgcaatttagccatgatgttactgcaaaaagtgcagtaacaacctataaattttgcagtaacaacctataatttccgcagtaacgtatcgtgttgctgcagttctgtgataatattactaccgaatcatagtaactaagtatgatttctacagtaaacataactgatgtgttctcacaaaatttcaacaaacatgcaaaactagtaaacaatgatctctaatcacttagtgtcatagagtgaattggttaagagagtttgccacgagctttgagatcatgggttcaagtctcaaattcatcaatttatttttattttttcaaaaaaaaagaaaataataggagaaaaaaataagagaagagattatatatatatatatatatatatatatatatatatatatatatatatattaaatttatttggtgcttcatggtgcccgggctccatgattcaaattgtgtatatacccaattcaaatgagtatgaaactttttaaaaagtttacgtattaacatttactactttactaactagttcaaagaaagtttgaactgaatttaaacatgtttttattagaatttgattctaggtatatagcatccaaacatataattagttaggtatataatattggattgtgaaataaagttaaatttgcgttgttttgttgctaggtataggtatgaatcgaatacttataactaggtatcaaatatttttggcaagtaaagtaggtatcaatctgcttgaaagcctgcagagtccaattttgagtattttcagttagaatctagagtcagcctattcagttcttagcccttaagggtaaggcaggggattcttttttcgaggacccggcgacaactctttctagacggtaggggaaccctagtgaaatcagtaatcaacgcactcccactcctcttgctccaattccctctctttcctgcaaaagctccaagttattcagactggtcaacaattcttcctttgttctcctaatctctccatatatgtatgtatgtatgtatgtatgtatgtatgtatgtatgtatgtatgtatgtgtatatatatatacatatatatatatacatatatgtatttatatatatatacagacacacactttgagagaagagagaaagttaatacgaggaaaatagctagtttgcgaaaattcataaaatcccatgagtctgacaggtgaagcaagaaggactggaatcaagatagttccatttatcaattacccaagatggtaagtagccactgataaagttcacaggtacatgcatgtttttgatgtgaccatggctactatggatacatccgttgctcacatcatgcatgaacaacaagatatcaagttcaagtcctccaagtgttggaatccgattcggtcacctgctacactgctgacttcaaacggccgccgaatctgcatacgacctttattttcggcccgtgagtacttgatgaaaagctctcggagtcctctttccaatggatccgaccaaattgccaaattccatctaaatcagcagcaactgaagaaacaatatgctacgacacctctaatgggcctatgggcttgtaacttcgtctgggaccctggcccaagtagggcccatgtggggtgcgccccaatcaggtggaggatgacgtcgggtcctcctatctcgataaatagccttgtactccttctgggtttgttgggttttgtttagattaaagtctagctttgctactttgccgggtaatcccgtgatcggttagatcgccggtttgctcgttacggaaccccaaacttatcatttgtgttcaatttctatctgcaattcagattgcttttatcttgttcttgcttgtttcttcgatttgcttgcaggaataaggttgatctgcatcggcaagatcaacaacccacgaagaggtgtatcgatcgctaaggcgcaacacaacaacgtctcgtacggttgtagtcgggtcatcaacgtttctcccaaatcgtagttatcaacaactcactgaaagatcgggccaacaacagccttgagtgtcttgagtggagctcagggttcatcagttttgaataatttatatgctcggattatatcttagagaaattcattctacactaacttttactcagggacgaataaagagctaagtgtagggggttttgttggtggttattaaatgccgattctatattgccaacatcagcataatgtccagaaaatgaaacatccaacatagtgataggtattaaatctcacatattccacaagtgttggtgtatatttgtatgcaggtgatgaaccccgaagttgggagggaaatcagactaaagtgaggagaaatatatatccatacaaggatgggttgtgaacttcatcaaaataccagagaatcagcccaaaactctgagaaatggatagagaaggactaggagagaagataggccgaaggccaggccaggagggcccatgtcacaccctgaagttcttctctcgagcctaaattgaagttataaatggtctcaagaaaatactggtgtaaaagcaagagtgaaaccctaataaattaatgcaaataataatcggaatctgcatgtggaatttttcttgtgttctacatgtcgaaacatgctaacaagatttttagtggaattttcagagctctaaaaataattttaatcaattaaaaatgagcacaagcaatatttaaatccctagaaattcttttccctttttctttttcctttttccctaatgggccgccggcccatttcctcctctctctcccacgccttgctgggccggccggaggccacggcctagttcagcccgcgccccctcctctctctcctagggtcactgataggtggggcccacctatcgggcccgtccccgacctctagccggcgccgccgcatctcgcaaccgccgccccgctcgctcccgcacctcccgggccacgtcgcccacgtcgccgccttcccccacgttccccgcgcccactccctctctctcccgcccgcgcccgcgctcgacacggccgggattcgaatttcgaatcccgcctctctctccacctccacctccctacgtcggccggcgaaattgggccactcccggccacgtccaagccccctctcccctatttaagcatcaccgccctcccctctctctttttctccatttcgccgagttcccccgtgccctccaccgccctagcgccgtcgccctcctctccgccaccgccgccaccgctcctattgccgctagccgccactagccgccgtgccgagccgcgccgtgcgccggtgagcaccgccatggccgccgccttcggctggcgtcctcgccctcttccattttcctgaatccctctaacccctctcatcttgttcgcttggtgattccggggaccgtccgtcgttcgcaattgccgctcgccgtcgctcgccgccgttcgccgtcgcccctccatgccggccgaaccctcggtgagcacctccccgtcatctttcccctctccctcttagcgtcgccgcccttgccactcggggccgcgtcgccgtcgctcgccgtgcgccgccgttcgccgtcgctcgccgtgcgctgccgttcaccgtcgctcgccgtgcgccgccgttcgccgtcgctcgccgccgttcgccgccgccgccccgcggtagtgccgccgtgcgccatggccaccgggccggcttgagccgtccatgcgcgccagccgcgtgctcccacctccctccgatctacctcggggccgtccgtatggccgcccgcgtggctgccacgtggccgctgtgtcggcgccacgtcagcgatacgtggtgcgctgccccctccccgatctgtggacccggtccaccgcggaccgccaccccgagccactgccatgtggggctcgcatgtcggcgccgccccctctctccaggattttaattattgcgcaataaattatttaaggcttttctgtttatagtaaaaacatagtgaatcttctaaaattcatagaaaattcatccgagctccgtttaagcccattcaagtctcagtaaatcaaaaaaatgcatagaatccattaaaaatggttttgttctctgtttcagtagtcttatggcctgtttgtattgtttgctttgtatgtcacttagattccgactctcccgacgctccggtgtactttgaaatagtcgtagagcaaggcaagtcatgcttgtcacttgaacttgttgatcctatattgcaaatgctccattgttttcctttaaatactgcattgttttacaatgataccatgtgatggttacctactgtttcagctatgctatttgtaccatgctcctttgttagcttgggatataacatgactagatcttggactagggattgcttagccatgcttagttcaactagcacacaatgggggaatcacattaatgtatagacttcaggttctagtgttgatgttggattagagcaaccgtcttggtgttggtcaattaaaatataccatatggtgtgtcacgcccggaatttctatccaaaattccaaacgcttacatatgtgtgaaccctcgtccaggaatcagccgaggcacacaataacaaattgataatagagtacaattattactctaattaataagcgaataaaatgtcattacagaggtagatagttcctctcaatcaataaagatctaagcagcggaaaataagttaaacggcgcagaaggctccactccacaggcagcttgaccagggctacacctaatcctccacaccatcagcatcattgtagaactcttcctctgatgaatgattgcaaggtgagtatatgacatactcagcaagccacgcagcaaatatgcaagtgcacaggataacaaagaatggcatagtagggtttcatttgcataaacagcatttaataaacatttcagaatttagtaaaacagttaagtaataattaaacactattaatccaacgctatacaacataccctgctgtataggcccaaccattctgaacaaccatacccggctgtatagatctatctccaaaccaggaatataccattccaaaccaggagctaatcagattattatcagttatagcatcatttactatggtgagaagggtgagactaatcacgaaagacatacccataaccgcgggcacggctattcgaatagttttactctgatcagaggtgtaccactgtacccacaagacacagccccacatcatgtcaccatgtgcctcaataccaccacggtacctcggaaaggagctgtgacaatacccctcgtacaacacaatccactacagcgcacctttcctggatcataatcacccccttataaacaaggcatagactccccagcgacccccgtgggcttatctccgccacttctcagtctggtgccccgcaatgaaccatgctatacaaaagataaagccgttgcccacgctggcttgtggttggcacggttaatgtttcacaaccgaaactcgtgaaccggtccttaattgtcatgagcacgaccatcaaaaccatgtgctcacaacccaccattatcaggttttagttggcaggtaattaattaaccaatcacgattgaccatcatgaactatcattaagccatcattaaataatagtgaatcataagttatcccaatagtgtgctaatgtttctaagcatggctaagcaatcatacctaatatctagttgaaccaatatatatatagcccaactagtcaagttgtaataacccaaggtatcaaggaataaagtgatcaagaacaaaaagagctataacaaacaataagttaattgcacccaatgacatttgaaaatagatgcaatagttgaatagaaacaatagctttaaataggatcaacatgctcaaagggttgtttgggatctgtgtgacttgccttgctggccttggaactcttcaaattcttctcctgcaaaaaacggactctccggaaacgtcagaatttaaacagaaaagagcaaaatcaccaaacaacacataaacaagcatgaacagtacatgtggatatttttaacatgtagatctcaattttagaaaaatttagagacttgaaccaactaaatccgagctaagatgaattagttatgaatttttaaagattaaatcagattaaaacacttatattgattttaattgaattatgacgcaataatgaattatttttgaaaaggaaaagaggtttattgcgtcagcggctaggatttccggtggaccgggcgcacggcggttcacgggaacggacggccgagattgatccatccaaaacggacggccgagatccatcggtccacgaccgggccacgggagacggcgacgatgacgtcagcggtgacgtcatctccggcgacggctcgggcggcgcaagctcgtcggcgaacgacggcgcgacgacgagaacggagggcaccaggacgtagagcgcgacgcggcgaactcaccggtgaccaaagaaatggcggatgatcaacggacggcgacggcgacgaggaagaagcggcggcgctcttcggcttgacgacggcgacggtgctccggcggtctacagcgacggcgaaggggcggacgaggacggtggcgacttggcgaccacaatggcgaccttcccgagcgacgacgatgactggagcgacgggggcacacggctgaagcggcggcgacgacggcggcgcgaggtcacacgacgctagggcgctaccgacggcgagagacgaaggcaaggggggcgacgggtagcggcgggcttggggatccttttaaaggggcaaggaggcggcggcgaaggcccacggcgaccggcgacgcgaaggaaacttcgggtttgggagagagagaggaatccgattcgatctcgaatccatcgatttccaaaccgaaatagatgatgtttccaaaagggaaaaggtagagaagatctcgggaaacatttcccctcttttgatttcaccggagaaggaaaggagcggccggatttggaaggagacggcggcggctcggcgctagggtttcgggcggcggcggccggaggtagacgacgacctgacaggcgggccccacctatcagcgagcgagggcgcgcgcgcggctgcggcggactgggccgacttgggccggggagagagagagagagagggttttgggcccaaagccaaaagagacttttaaaaatatttttcaatttaaattattcatgaaatgcaattccatttattaaaaatacttccttagctcaaataaatcccagaaaaatctaggaattatagaattaagcaaagtatttaataaaattttatatgaccccattttatattggaatttattaattaaaattagatcttctcttctaggcttttaaaataaattctaataattccatttaaacaacaatttatatatttaggatttttagggtgtgacatggtgggctgtgggtgcatggttttgatggtcgcacccatggttttgaccggttcgcgggatgccctggaagaacttattgtacttaccacaagccagcgtgggcaacggctgggcttgtagtgtagctttcctctagctgacgcatccaggcaagggtgggcgtgatggagtttggatgggccctgcgacggcctatgcgtcttccgaatttacctaggcacgagaggggactgcccgctgccttgcgaggagtgggggtgaaacctgaggtgtggtgtgcttggttagaggggggttatgcgaatggtcctgtcatggcctctttccggtatgtcgtggtggcatgtcggcgcacggaaacgtgtcgtggggctgtgtcttgtgggtacagttgtacacctctgatcagagtaaaactattcgaatagccgtgcccgcggttatgggcggtcaaccagattcaccgtgattagtctcaccctagtctagtctgttggaattgattagtttaggtggatggttgggcctgttgcaacgtggtatagcgttggacagcggatggttaatattgattaattgttacaactgttttactgctttcaactactgtttataaatgctcgctttatgcaaatgaatcgctctagctatcctttggttacaccctgcatcataccccctattccggtatgacttgctaagtacggtggttgtactcagtcttgctctattttccccaaaccccagagtttaagtatgcgtccgatggtggtttttccgaggagtaggcttcgtccgtgccgttgaggatgcctgtggagtggtgttcccgctacagtccaagtcaaggcttagctccggttatcttttaattttccgctgcatttatctaagacttttatgatgtttgtaagacgtggatctgtatgtcaacgttgtcgtttgtgtaccccggccggtcctggacgggggttttaatgcacattctgcttggaattctattcgggaatttttgggcgtgacagcccagcccaggttcggctgggccctggtaagcgtcgttggatcctggttttggcgtggacgctccatatcaatccctgatggcggttgcagggcagttcggacaattccccttcccataaccgtcatacctgtcctataaatagacctcacctcattcactcacacacacttccaagcttgagctgaattataggaggctctattgtactatattgtataatagaatagaatgagagtatagtagaagaagtcggaagaattccggagttgtcggtaatcttctctcatttcttttattatgtttattactatgatttcaatataattatcttcctgagtaatttagatttatcttatgagaattatctcttggttagttcctaaataacatatgtgattattgttcactataattaactaaaatatagtgattgcttggtgagtgataaacactaaagtagatattaattgcttagaggtggtgcttagacttgggatataaacactccagtaattgctgcgtatcccacagtacgtttgagataggtgtagaggtggtgatggccctcgagatcacttaagttcgccctgtccgggtacgtagtagagcgacatctgggaacagcgggttgccagtgcctgaagtattgcgttaagattaaacatagactttccctagactgtttctcactaataaatcctctctatactagcctatcctttgattggtgtccttggatgaaccggaggaagatctacccacacacattcccttggattcgatacccttggaatactccgtaggggaagtgctacatcggtatatccgtgcgcttgtggattttatctgtgaccgtaagaattaccaacaagcatttctgatgccgttgccggggaacggttgctgatcacatccaaacccagttcatcctcgtatctattttcgtttttttattctaccttcacccctgctaccaagagaagtattcctatcaaactcttctggattatggagcaacctttctttgagttgcctgctcctaggggcgaattctatgagccatctccttcatcggagccaatttataaaactggctatgaaatttgccccgaactaatcaacatggttagggaaaatcctttttttggttttgatccaaaaaaatacctaccatcatctacgatttgggagaaacgttcatgatctgactacaaccgtactagacgttattgtgttgcgccttagcgatcgatacatatctccgtgggttgttgaaacaattaaaaacctacaagccattcatcacaacatataaaacctacaagcctaagtcaaaattcataagtctgaaaattcctatctttaaatcctaaacatttgcatatctaacctatctcaaaatatgcctagtttaaaattcctaagtcaaaagattgtaagtctaaaatttttaagtccaaaaattcctaagtctaaattgtgaacataatttgcatatatatccttcagtcagaaattcacaagtctaaaattcataagtccagaaaattgtaagggtaaattctagacatttgcatataattcacattcatatttgctgggactcggcgtgccaatcaacttcagcctgagacgtgcccgtcaaaccacacgaaggcggcgaccagatgtgttacacatcccaggagacttgactaaatcgctagagctctacaacatttcaaatgctctaaatatttacatatatatcataagtgaaaagttccaaagtctataatatctaagaattcataagtgcaaaaatatagatgcgattgttttttacctccaacatggggtgagcatatgattttaagagtttctcgtcctcaagtcatcgagcctataatagaaaacataaaatagaatccataataatagtaaatattcaaatgcattacacataaagtacacttccatagttcatgcataaacactaattaaatacatttttttcacataaatctagctagttggtttttcttttcctaggagctaatttcgtcgcggcttggtcccgagggggaggggcagaagattgcactcgttttgggaccttgttgatgttgtattcgccagttgggtctatgacataatgacgaatgaacccgcaaaactcgtcagtgagagttttgaagacgtgtggtagaatttcacttgtatcgagacccaatttctacaacacaaggatggaaacgcttagaaatttacttagtacttaaatagaattgcttaatgttatgacttaggtacctgaagcatgtcatacctcagcattgcggtgattgtatccatcctctacaaaatatagcatgtaccgcatgacgtagaatccgcagaggtaggtggcctctggttgacgaaggatatatttatgttcaaagacccgaaattcagttgcatcaatcatgcatctcccatacgatctttcggacctacggtacttcttatatgccttatttagtgcacttaaaatagtttggtacttgtctatccctctcctcaggctatcatatatgcaaatcgcactgtcatctatgttgattacgaggaggatccaatgatggctacacatagtgacaatgtatcaataacttgatatgggtcgagagaaaacataactggacatcgatgatagtgacttactaagaaaggtaaggcagcaaaatgtggtcacatccattaagcttgacgagggcatcaaagagatagcggtcaatttcagcttcggaggtacgtagaattactgagagtacgtagaatgctatggattaaggacgacaagatatcaaaggactcacaatgaccacaattgcaggaggtagatagcgagttcccttctttggtacaactggaagagttccttaaaatctacaaagcatgtattactggggtggtgaaaatccacgtcggtatagtaggaaccgaacatcccgacaccctttttggcctcctccaaatagcattcatgcagccaatgcgcttgagttcctaaggattcaatttccgtgtctagcaccatcggttgaccaagttggaaccgcattacaattggggcctcttgaagttcatctagattgtccaggcttttcaaaccagctgatttgcagaaatcagcttccttggacgctttttgttcaaggtacaactccctagactaagcttgcagatcttttttgccaagaattctccagaagtccgatataggcttcttaggtgacttcggttgtgcgcacttgatgaaatgctcgatgacatgcggaggaattggaatctttggttccttgggcttcttaggaccaaaaagcgaaatgatgctggcgttcattgtcttcttaggcagcgacgttgtcggctttgacactaagtctgaattggaatgtttgagtcgctctttgcttgacgaaacagacatctgtgatgcacttggtgttcgggtcttttttctgagtgggggtggactcgtggatttctccggacgatgtcgttcattaggtgtgttttcatgaggaggtggacaggaggtcctctgtcgaggcggagaaggagctagatttggacctcatccgtttgaagggctagaagcaccgtcacctggatcccctgccccatcgttcgacatgataatgatatagcatttgagccatacgatcaggttgtgaagagcagtgcccagagtgtcaaccccttcctctggaggaaactgtagaacataacctctatattggcttggcatgtcttccacctcaacccttgagtggcctgcatgcaacggaacaccgtgtattatttgccctgcacatattggatgtgccacaccgcgtgcaatctcctgagtaatattgctctgaagagggacatggagcgtgcacggagtatgtgttgttatgtcgtccacagcataacgtgccgtgtccagttctggaggggggttatccgtggaagcgcaactgccccatttcgcacctgggctaaccacttggtcaccggcttgcccctgttgtcctggtaccccattgggaaacatcactgcaagttgttcctttatctgatgggccacctctaatctcacacgttcagcctcctcttctctcgtgggtcttcttggatgggcccgatacatgtgtgcatcatccgggatcccttccttccatggaatggaaccaacacctctcgtgtgtccagggtgctctttcgtcccaatgccactgtgagctcatcctttttctcttactggcacatatttaccctgtctcgctagggaaacggcctcggtgaccttttctttcagctcttgttgtcaagatcccagagcgaccaactcccctgaatccgatagttgagccttcctggcgtacgcgtagtgctttgtttgggtcccccaaccatctgtctcgagaactatacctgcttggcgcaattgttcctccttctcttcccatttgggaatattcttagcatatctgctcgggccaagtcggtgtggaaacttgttcaacgtggagttggccttgtttagggcgctcacttctctttcctcctaagatgttttccagctcacaaactcatccaagtaatctgccaactttcgatacctgggtttctcaaaatccggggtccggttgcattggacgaagtccgcgttcaagtcagtcctccactttttgaataatgtgcacatcttcgatagggaatttgatctagattaggttcaccatgatcgacacatgtttggtcctccttctccttgcagccgacatccgcatcatgcctgtgacagttgccggcacttcctcaccttgcttctcctcgccaaggaagttatccataaaaccccatgtaaggagatgtgaatggacctgctaagccggaagttgtctgtctttcttgcaatcatggcatggacaccaaatatattctggtgcatcgactgagtttgcgctggtggccgcggcaacgagagtcgttactcccctgaaatactccacagtcacgatccgctgtagttatccattctagatccattatatccaatgggtacctgtgattattatcgtttattacaaactgtaaagaaaaaacaagcaagatttcataatttacaagcacattataataaaaacaacgaggaatgaccattttaccctacgataaaattgaggtttttgcacacacccacgtcaccttaattagatagtcatggctaatgaaaagataaaaaaattctattttttgtcaatgcgaaaaagtatttgtctaatgtgaaacattaacgacgatggcatagatggaataaaccattaattcaaatttagcataacacccgagaatagatctatgaataaccgatggatccatacaaatgactagtgcattttgcatgtattaccacatggcaattcaattcaacgagcggatgtgaatcggggtgagaaataatgaatatttaccttgtaggcttcaaccttcaaccaaaacccaagaaaaattgagcaaaaccgcttccacctcctatagcggatcaatggatatttccgtagccttaacatagtttgactagcattaatttgactaacgggcatgacgtagatggaagaaaacattaccgctaatttggcatttcatccaacaatagactcaacaaataggtgccggtttttaggcttgaactggcacctattaggaccatataggtgttggttttaaactaaaaaccgctacctattttaatagccacgtggcaatttggcttagaaccggtacctattaggactatataggtgccggttttgaggtcaaaacatgttaacgaacaaatttggtaagatatgaaccaggttcgacattgggatcgaggtggattcggcaaagagttagattcgaagaacagcgtgcgcatcagctgcgaaggcatcggctggagtttgaatcgactgaaggggatcggatgacagccgatacagccgatagagttgatacagccgatacagccgatggggttgatacagccgattccaatggcggtggcttcgaggctgtttctagaatctatcaacgtgcttcacagggattgccatgatggagataaagctctcagaaaagcaattgtatctattatctaggatattttgtataatttccttagagatatgtttaggcaaaagtctgccgcaaagacttatggtatctaagagtttgttaagagtcgtgtccggcaaggacatattttgtaaccacgggtataaatagaactcgaacccatgtaatcaattaacacacgttcaatacactttcggcacatcgccaccttgttactttcgttctatttcgatgagttcttgctttcgagttgagctgcatcgattcgatctttaactagaggtaaacttgtcatggcggcttgcgttctcgggattagtgcttccatcttcatgacactctaatcctatttatgtaattcatcgagttatcatatatactttataatctctgttagtttcgctatataacttgccatcggttagtttttattgctagaatgtagctgatagagttagatcccgttactaatctagattatattgtatatctaccatctcttagagattttcatcatcttgcctagatcttatacttgttttaatgcttgatgctgcatcggttaggttcgatctattaagtaatatctataattataatatctggcctgttttatgataatcaagagatttagctactttatgtttcatatgcttgattgatatgctagatatgccatttatattaagatcttattgcattaaggtatgttaggcttcttgtttaatatattctgtttgttttgatatcttaatatagagtagtatcgaagtaatagctgatacatgctagatttacctgatcggctatgctataaacatctatataatcatggcttaaatgcatatttcgacttaagtgatttatactgtctcggcatgacgaccgatctatcccaatcacttggcttaaatatgcatcgaagtaatgattatgttatgctaatatctacagccgatcgagtagatttagttttgtgttattcactcatgacagccgatcgattacaatatgacatcggcttggagataaatgatatgtcatcggcaactagccgatcagctatcgtttatgggtttaaccgcggttttcttgtctttctttcttattgattgcaggatcaaaccaactagcacgctcacgaacctaaaggcgagattttggacctacataggagttaagcagatcttccaggccagtgtgtgtttttcgcatcaataaaaccggcacctatttgacagccacatggcaatttggcttagaaccggcacctattaggaccatataggcacctattacctaataggtgctagttcgaccgatgacaagtatcatcagtgccgccttctttgtgctggttcggaaaaccagcacctattagggtttccaaaccggcaccttttactctctctgtagtgaatcaccagctgattacttgatgaatttacaacttatacacaaagaatcttccatgcaaccagcattacaaatacaacaaatttgtagcatttagttccttgtttcttgtcaacattcagaatggctcttgcatactagctagcagtgcttcttgatttgtaacaccacctagaagtagcaatgcttgggcatatatttgacaccaactaaacagctgctgatgccgccggcgctgccaatcctggccgctgttgacactgatgctagacgtacaaggttgcctccatgaccaacctccggcactgctcaatggcagcgcagaagtgtgggctggcagcggaaatcacgacgatacgccagggaggagatcaacaagagccacggcgcccgggtctccgcgaatgagttgaggctgatggtgatggtgaccggcgtcgatggggacaggctgggctgaaggccgcgaggcaggggcgcagccgtgcaggtcgtcgttggcggtggtggcaatgggagagtggcgcaagtttgggggcaattacaggagagggttgctacaggagaagaggaaatcattggacaggggttttcttgaaaaattacagtgcaagaggcggtcatcttttcgcaaaaatccatcatcctgatggccgccgttagattgatatcggaaagctgtggttgcgcgagcacattagtgcactgatcaggctgagtgcacctgatacgttgccgttatctttagtctacacaaaactagtttctgtttaactagtttgggagcctaaggacctgtttggttggtacctgagctcatatgtctgacctgacagctagcctggtctaagcagtgtttggttgaaggcctgagtaatcaaatgcttgcctgacctgacactctctggctgcttcattagcttgagtcaggtcatcgattttggtggcctgagcttcaggcgagtatctagccaacgtgtttttcaccctgtcacatcgaacgtttgaatacatgtattaagtattaaatataggctaaaaaataactaattgtacatattacgactaatttacgcgacgaatcttttaagcctaattactccatgatttgacaatgtggtgctacagtaaacatttgctaataacggattaattaagcaataaattcgtctcgcggtttactgagggattctgtaattagtttttttttattagtgcccgaacaccccatgtgacaccctatataatacccgatgtgacacgccaaaactttataccctgatctaaacacctccttaatgactaatcaaatcagcatggcaaatacacttgcatttgtccatctttagacatgggattaattcactaatttctgttaacattttttaacaagagatgcaattaagagatgcaactaatttaatttgatggttataatctatccatttaattaatacctaaaaccttgttgtataagagttgataacaaatattgctttcaatttttcaagtccaagcgaaagtgcctgtagcctagtggttataagagcctcagtagcacctgagggcctgggttcgactccccttgggagcgaattttccaggatttaacggcgttttgcttttagtggtaggcgacgtacccggcgacagcgaggtgcctgtggtgacttcgtcaatctctccaggggggtagggcttgcgtgcgtatgttcataggggtggcatctctccaggatttgccggcccagtcttcgaagatgcaaataggggtagggcttgcgtgcgtatgttcataggggtggccgccagatccgcaccgctccggccgaatctggtggtggcggcggtaggggcgagggctagcacggctggcggctggcgaaggggatggcgacggcgaggtggatccagcacccggaggaggatctggccactagggacaaggacgaggcccgtcgcggcggtggtggtgcggagctcacggtggcggtggcaaggtggctgcggcagcggtggcacggagctcgcggtgatggtggcgtgaagcctgcggcgacgggagcgacaacaggtggccggcggcactagcaggtggctggtttgctgacggcgccatcgggtggctggctagctggcaggcagcggcggagatcggcgtggggaccgcggcgcgaggaggcacggaggaccggcacggatggaggctgcgtaggccggcaaggcacaggcagtggtggcgacggggttggctgcggcatgaggaggcttggccggtggcggcagtggtggtgccgcaggagtgtcgtggtgcgatcggcaaaggtagtgaccagcgcagcgataggctacaaggtgcggtcggtggtggtaggcagaggctagccggcgagggtcgccggtgcagcgttgcccttgcgccgacagaggttagatggcagtggagcatcggtgcgtcaacaggggataagctggtagtggatggcgggtgaaaacctagttcggctttgcccaagccggcaacgatggcgctcaagcatcactccctctagtgggctgccgggtgaaatctcagttaaggttcttgagaccttgacaaatggcggcggtggttctttcatcacttctctccttggagacgtcgtctaggcagcaccctcgctgaagccacccatataactcttgcaagctcgctctatagtctcttcctcttgtatcggtgtcctagtttatacaagctggccgcgtcggagagccttggggggagagcggttccattcttgtctctcaccctctctccctaaatctctatgatgtggatagagcgggttttgtgtcggttgagggttgggttttgtgcgttcccagttgtagttcctttgttggcccagcggcggtcggtaatgcttagcagcggccggttcggtgctagcctccttctgggtttgtgtttgtgctgtcagtgtgtgggtggtggtatactttttttttcctagttacggcctcccagggatgtaatcttgtaatttttttctgctctatcaatataaacttcgcactgtgtgcgagtcattaaaaaaatagtgaaactttggcattccaaggatcatttcctctcctcttatgtagggtggtcgcatatacgaaaaatgtgatgagtactgctagattttcatggctatgatattgaacagcaatacgctgattactgtgtgcagagttatcaaagcaatttaaggtatatgcaccatatgatcaagctagtcagtgtttatttatgttatgtagaattgttttcaaataatgctgaccttgacaaccttttatcatttgacagtggcttaaagattgttggtatttcttaacgacattactagaaatataattcccagcaatggtgcagaaatacttctggtatattatggttatagagttcatccgcaagcgcacggatataccattatagcatttcacccgagagtattccaagggtatcgtatttattttatcccgtggaaagatcatgtagagagaactcaactaataatttatatattacttgtaataatcatactcttagcaggggttaagataatccaagggtagagtgacacacaagcattaactactcattctcataataaataatctaagcttagtggaaagaaaagagaaacagaatctattcctatacttctaatatacatggtatacatacattctagttaattgatatgctaactaataccctctatccgatgccctcctggtacttcgagaagccacccctgactgtcaagttccttacgacagcccgtcatgaccatacaactggggctaaatactgaggaatacccttcccaagatattaacttaggattatataccggcgcggaggaatacccgtactgagctgtcaccatcagcggcccacctctcatccgcaatatataaccccaaataatgatatcccgtaatctagacaccacgcctaaactaccagatactactctaatatcatcgtcatgacatagagtaattgcataagcaaacattatacccgcaccaaagcatctcccatataagctagccgtatattcagtataacatgaacataatgtaaagtaggtactcatatactcgaaaagtatttcaataccataaatgtatatagaagagtattctaataaaagtatgaagcttataaaagaggaaaggaaagctgctatagccatacccgaactcttccgaaggcttccaaactcctgatttctactctattcctattccacctgctagatagtactaaactaaacttgagagaaatgagagagctattgcttgaggtgtgtgagtgaagtgagaaggtgaagtccttttataggcaggtatgacagttgtaactgctgcgaaatgtctgaagtaccccgcaaccgccatcaggagaggatctggagcgtccctgccaaaccccacatccaacggtggagagggaggttcggccgaaccagggaccggcccaacctggcccaaaatcggcaggtggcctcctccattgttcttcttcgcagacttgtgaattttggcccaattcatcgtgtcaattctgagttcttggcccattcatacataagtctggttctcgacatcgtccaattgatttatcatttgagttgatgtcgattctcctccactttattgtcattctttgcaaaaggttagtctacctaatactagtgaaatattattattctaacatatttatgcattgcaagcatcactagttctcctctattttagtaatattgacggtcgaaactgatcgataatgaccgtcaacaaaaccccccaagctctgctcgtcccgagtgaaggacgaaaggaaacaaagacttggttgttgatcaggagttgctactatgctgcatatctcaaagatacaggtgcaaggtatatgtactctctctcagattaaataatctttggcacgatggcttacccttacccctgattcccacgagacactgtttctctttgccttgggcggttgaaagacagaacaacaattagagcaccaatcacccaatatttattcaactttcattccggaagttttcaaatgattttgcaaaagaaagccaagttcctcaattgattcactcagtctctctaagtgaatcaatataaattcctcaccaaatgttaccttgttgattcctactctaaggtttatatgtggagctcggtagggatcaaacatgacccaaaatcggcgggtggcctcctccattgttcttttggcccaattcatcatgtcaattctgagttcttggcccattcatacataagtctggttctcgacatcgtccgattgatttatcgtttgagttgatgtcgattctcctccactttattgtcattctctgcaaaaggttagtatacctaatactagtgaaatattattattctaatatatttatgcattgcaagcatcactagttctcctctattttagtaatattgacggtcgaaactgatcgataatgaccgtcaacaaagactacgtgctagttgagcgactattggtaagtactccctccatcctattttaagtacagccatgttttttcatgcatgactttgatcgtccgtcttatttaaaaaaatttaaaacataagtcacgtataaagtactatttatatcttattatctcataacaataaaaatactaattataaaaaattcaaataagtcgaacgattaaaattgagcacagaaacttatgattgcacttaaaatgggatggagggagtatttctatagtaaaagcatggaataatgccatatgtacattttgtaacaccatgataactctttgtggggaccactattctctagagcaaccaaccaagcactcaagattgcttctcgattttccaagatctctgggataatctagcttctattggctattacatacgaacttatcttacactcactattagagtaggtacaataaagatagtgagcgtactccaaaatattccacatgatcatattcatattgtcacgcccggaatttctatccaaaattccaaacgcttacatgtgtgtgaaccctcgtccaggaatcagccgaggcacacaataacaaattgataatagagtacaattattactctaattaatacgcgaataaaatgtcattacagaggtagatagttcctctcaatcaataaagatctaagcagcggaaaataaaataaacggcgcagacggctccactccacaggcagcttgaccagggctacacctaatcctccacaccatcagcttcactgtagaactcttcctctgatgaatgattgcaaggtgagtatatgacatactcagcaagccacgcagcaaatatgcaagtgcacaggataacaaaggatggcataatagggttccatttgcaaaagcagcatttagcaaacatttgagaatttaataaaacagttaagtattaaacaatattaatccaacgctatacaacataccctgttgtataggcccaaccattctgaacaaccatcccggctgcacagttctatctccaaaccaggaatataccattccaaaccaggagctaatcaaattattactagttatagcatcttctattatggtgagaagtgtgagactaatcacgaaagacattgttagacccgcccataaccgcgggcacggctattcgaatagttttactctgatcagaggtgtaccactgtacccacaagacaaccccacatcatgtcaccatgtgcctcaataccaccacggtacctcggaaaggagttgtgacattacctctcgtacaacacaatccactgcagcgcacctttcctggatcataatcacccccttataaacaaggcatggactccccagcgacccccgtgggcttatctccgccacttctcagtctggtgccccgcaatgaaccatgctatacaaaagataaagccgttgcccacgctggcttgtggttggcacggttaatgtttcacaaccgaaactcgtgaaccggtccttaattgtcatgagcacaaccatgaaaaccatgtgctcacaacccaccattatcaggttttagttggcacattaattaattaatcaatcacgattgaccatcgtgaactatcattaagccatcattaaataacagtgagtcataagttatcccaatagtgtgctaatgtttctaagcatagctaagcaattatatctaatatctagttgaaccaatataaataaagctcaactagtcaaattgtaataacccaaggtatcaaggaataaagtaatcaagaacaaaagggccatagcaaacaataggttaattccacccaatgacattcgaaaataaatgcaatagttgaataaaagcaatagctttaaataggatcaacatgctcaaagggttgtttgggatctgtgtgacttgccttgctggccttggaactcttcaaactcttctccggcgaaaacggactctccggaaacgacgggatctaaacagaaaagagcaaaaacaccaaaacagcacataaacaagcatgaacagtacatgtggatatttttaacatgtagatctcaattttagaaaaatttagagacttgaaccaactaaatccgagctaagatgaattagttatgaacttttgaagatttaatcggattaaaacacttaaattgattttaattgaattatgacgcaataatgaattatttttgaaaaggaaaagaggatttattgcgtcagcggctagggtttcggtgaaccgggcgcacgggcgacggttcacacgaacggacggccgagatcgacttgatccaaaacggacggccgagatccatcgggtccacggcggctcacggaagagggcgacgatgacgtcggcgacgacgtcacctccgacgacggctcggcggctcgggctcgcacgctcgccggcgaacgacggcgctacggcacaaacggagagcaccaggacgtagagcgcggcgcggcgaactcaccgatgaccaaaggagcggcggaagaccaacggacggcgacggcgacgaggttgaagcggcggcggtcttcgggtcgacggtgacgacggtgctctggcggtcttcggcggtggccaaggggcggacgaggacggcgacgacttggcgatcatgacggcggtcttcccgagcgacggctatgaccggaacggcggcggcgcacggctggagcgacggtgacgacggcggctcaaagctacacggtgctagggcactacggacgacgagaggcgaaggcgaaggaggcgacgggtagagaagagctcgggggtccttttaaaggggctcggaggcgacggcgaaggcccacggcgaccggcgacgagaaggaaagatcggtgtttgaaggaaagaggccgatccgaatcgaactcgattccacgaacttccaaaacgaattaaccgatgtttccaaaggggaaaaggtagaggagatcccaaagattgtttcccctcaatcaatttcaccggaaacggaaaggaacggccggatttggaaaggaacggcggcagcgcgaaactagggtttcgggcggcggcggccggaggttgacgacgaccctgacaggtgggccccacctgtcagcgggcggacgcgcgcgcgcgcggcggcggactgggccggactgggccgaggagagagagagcggttttgggccgactttcggcccaaagccaaaagagactttttaaaacttttttcaatttaaattatttatgaaatgcaattccatttattaaaaatacttccttagctcaaataaatcccagaaaaatctaggaattatagaattaagcaaagtatttaatgaaattttatctggccccattttatattgaaatttattaattaaaattaaatcttctcttctaggcttttaaaaataacttctaataattccaattaaacaacaatttataaattttaaattttcagggtgtgacacatatatagaggggagagaaagaaggagagaataaaacgggtgatagatctagcatacggtgttacacaaatatccatgcacaagagccagcatgtagccaatgaaggcggtagaaaacacgtatttggattgatgtttgaatgatgttcatgtgcatttttcaatttatttttttttggcaacttcctaaataagacagtagaaagggaaggggatttatttttttctggaaaatcattttctttggcggttggcttaatcttgccgtctgcagaagtctattttcgttgacggtccacttaaccttgctaccagcaaaaattatcagccgactgtttgttagcacaaatatattatttttaatggcctttgatcgctggcggtacagctgaccaccagcaaaacctattttgaccatcagcataaactgtttttaagtagtgactccctctgtttcttttcttggattcgccactagatgggttcgacttgttggttgccttccaactttcgtcaagccacgaattaatggtgcttgtgtcacttaggtggcccaagtagctgctcgcctgctcacaatccagcttgggatttgctcgtttccttaacaagatactccatatgaatgattcccaaagacaaattgtgtttaagagcaagtttaacagtatagcctactactagcttcaattcaaccatagccaatccagtagccaattcatataatagttgtttactatactatcaatatatggtcccatttatcatacacacacattgcgttttggagtctacgctgcagctggctacaaatctgtagtctgctgctcttctctctcattttttatctcattaaaatatgtttacagctggctaataatatgctattgtacctactctaattggttacaacctttataatatattttttatgttttccttgtaacgctttcttgtaatttttttccttttagtaaaaatctcactacgaggcaaagccctgacagtaatttagatgaaagaaaaacaagatactccatagaacaggctcggcctcggctcgtttgacatcagccgagctaagccaagacgagcccgagctattttcccagccctctgcagtctgcaccggtgcattattgtgtggaattctccattgccgcgtcgattttttttacactaagtagcgtcgacgtcgtcaatcaagcacagcaacctgtccagaccaatgctgaccatacatgcgtcgccccttgagcacggtcaccttgcagcgtcgtcgccccttgatcacggtcacctgcaacagcgtcgccgtctctactctctagcgaggcaccgtacgtgaaaaacctttcacaagcagcaaagaacgcgagcggcggcacgcgcggagatggccgcggacgccgccaccgccctcttgctgcggtgcgtggtgatcaccacgctcctgctgccgcgcgcgatcgcggcctacgtctacggcgacagcggcttcggcatcccccgcaatagtaccgagcgcttcctctacctacagaaccaggcccgcgccgacgtcggcgtcgcgccgctcgcgtgggacggcacggtggccgcgtacgcggagaagtacgccgccgcgaggaaaggtgactgtgatctcaagcactccggcggaccatacggggagaacatattctggggcagcgcgggcgccaactggacggccaccgacgcggtggcctcgtgggcctcggagaagcagtggtacaactgcagcgacgactcgtgcgacgctcccggtgggcgagggtgcacccactacaagcagatggtgtgggcgaagacgaccaaggtcgggtgcgcgtccgtgagctgcgacgcgaaccgcggcacgttcatggtgtgcgagtacgatccaccaggcaacgtgccgggtgtccaggcgtacgccggatgcggacacttcaatcaaacaggtacgtggtatgaacctgctatatccattttagaccatgtttggtgaagctccagcccccggattcttcgcttctcttctgttgggatagatctcaacaaaacgttattagaaccttgaaaacacgaagcagatctagcaggttggatcagccccaattaaaggcccaaataatgaacgcgaacgtgtggatttgagcggccttcaggtcgcttcacagctctagatccacaaccaataaacgacagtacacggtacacctaggtttgatgcaagaacgaacctataatttgtttcataaatttctataataaaatcatcgttgggaagaaaaagatcatgaaataacagaaaactaattccttaattaaatcaacattaatcataataaaatttgatatgaaaatataataacattggtcaagtacaatatcatatcattaatactttctcaccaaactttccattggttcaatttaataagaaataattttgagtgatcaaataattgatcataattttttttagcaattttaaatagctaagaagaaatataaatgaatttatgtaaattaatcaggaataaattcggcggttactaattaacaaattacttcgtccaagtcttccgagccgacctatagaagagattgcatgcccgtggggtacacgttccaacacgtgcacttgcaactgagcaaggcacagatggccaagttagctgcaaacacgtgcggcccattaggcctttcacagtgctccaccctggaccggtgctatgaggcgccacgttggatttttgctgtcgtgtcgctcggacccgcgtctcaagttggaacctcgtctccatgttgagcgacgcaggacttcgtcaaaacgatgccgtgagcagaggagaagactggaggcgtgcatgctgtgggcgtcgtggcttcgcccacacgtgccctcgcggtgaaatccaagggcgaaatccccgatacgccctccgaatccactcccgctacagcaaaatccagggcggcctcgccatctcgtcggacggcgccgcagctgccaccggggtgcccgacgagctgggaggcgcctagcacacttccagctgcatcaacacaaatcaaaatcaaaaccaaatcagaacaatgcaacaaatcaaagaacacaaatcgagggcaagtaaacaaaaatcgaacacaaatcaacaaatctgaacacacaccaccaacacacataccacgtcaccggcgagctcccaagaaacaaaaatggcggcggcagcgagatagatggatcgacgcttcgccggaggcagaagcggtcgaagcaatggagtgggggagggagaggggagggacggcggacagatccaccgccgccgctgccgccacgacgacctcctgcgccgcggaggtgtagaagccgtccgctcccgccgccggccgcccgtcggagccgtctcgtccactcccgccgctcccaccgtcggcgccgcgccgtccactacagccgcccccaccgctcccgagtccgagcgggaggaggagcgggcggcgcgggcggagcgagcggtgcgggcggcgcggtcgacggcgaggcgaggcgcacagcggcggtgtccccgacgtccgccgcgagggaggagagcacgacgagggaagagaaggcgaggcgaaggaggagatgcgctgagggtgaggggtaggtgaggaaaataaatttgggtgcgctacccgtgtcctcgcatagagtctcgcccactgtgggcttcgtttccttcacctgcgtctctatctaattaagctacacatatataggtgcttccactatggggtgagtgtctttgaactatgactttgggctaggggtatgggccctatagcttgcactgctattgcccttagtttccgtgtcccaaaggcatgcgcccggcggaggcggcccaatgcggtggcaaaagggcaaggatgcgtggcccattaacgcagcggtaagaagcggggacggggaggatgtgagctatctgatctgttggaagggtcagatcatcaggccttcctagtacgcgcgtacgcgccgcgagcagaactagcgtgcacgcggcgcacgttctcggaagaatacggtagttaaggataatgacggaaattaacaatagattttttattttattaggagattttttttactgatagattgaaaaaaattgaagttacatttgaaaacttttgacttaagatttaaattttgaactcaaattttgaaaactttcaactcaaactttgaaaattttcaatttgcaagaaaatttttgaaaactttcaactcgagatttgaaaactttcaactcaaatttgaaaactttcaacttgagatttgaaaacattcagttcgagatttgaaaactttcaactcggatttgaaaactttcagctcgagatttgaaaactttcacctcggatttgaaaactttcagctcgagatttgaaaactttcacctcggatttgaaaactttcagctcgagatttgaaaactttcaactcggatttgaaaactttcgactcggatttaaaaactttcaactcgagatttgaatttttttaaattaagatttaaaaattttcaagtcaaaatttaaaaactttcaaaaaaaattgaaaacacttgctgctggaagattaaaaagtaatcaggaaaaaaagcaaaaaaaaaatggaaagcgaaaaaaaatcacggaagaaaaaaaagcagaaaaaaaaaagaaaacaatggtgattagagaaggaaaaatcatgcgtgcgctgcgtgggccgtatgggccgggagtgcgcgctgcccccccccccccaacagacgcgtgatcagtagtactactatactactattactactacactactgttgttatactactactagtattactattattatatatatatatatatatatatatatatatatatatatgtataaaaaaatatatacgtatacaaactttatatacgtacgtattaaaaaaaataaaataaaaactagaaaatacatcacatatacaaagtttgtatatgcgtatacaaactttgcatacgcgtatacaaactttacatatatacgaatacaaactttatattcatgcatctttaaaaataaacgggaaaagaaccaaacagaacataaaccggaaaaaaaagaaaaaaaaccgaaaagaagcgagaaaaagggagaaaaaaaagaaaaaaaaacaaccgaacagaaacgacaaaaaagggaaaaaaaaggaaaactcgctactcccaatacggttagggatgaaaatggattggaaatggatgaaaactagctccaccataacattttcatattttctttactcggaatcgaaatcgaaaaccctggttataaaaatgaaaacgaacattatcaagtataaatacggagcgaatataaaatggatgaatgcggcaataactatttatcgaaatataaagaccccttaaattgagcttgcttgttatttttctgaaataataggtcaacattttcaaattttatatagttgattttcataggcagttccacaaccatttgcgaaacttaatttttatagtcagtctcttaatagacccatttttcacttctttatcccttacttgaactcaagacctcttcctccatgcatagcttatcatctcacctgttaacctctcgttgtctagattaaagatattattcattttatttcgcctctccaaaacagttttgtaatatctgttttgcactttaaataatttcatctaaaaaggccataaaaaacaaagtagtagatctataacttttgatagagagcatgtatatatacatttttttaaaagaaattctatatgtagatattcgaaaaaatactcttgatagtttccagccatttttttatctccgtattcatttccctatctaaatttatgcatccaagaatgtttctggaaatgtatctggatatcggaaaccatctgaaccgatttcgttcctaaatatgggaggctcaatatcttatttttgtatgtggttgtcttgggttagattgtcccagagtagaaccacaatttcattttaagatgaagcccactcgacaaaacaacccaaactaaggctgcgtttgtaacttagggttgggagcccatctcctccgcacggaaaacggagcagtccattagcatgtgattaattgagtgttagctattttttaaaaaaataaattaatttaatttttaagcaacttttgtataacaacattttgcaaaaaaaacgcaccgtttacccagagcacctaacacacccaagaaagtccataaaaaatggtaatttacaaggtctttaaagccgaaaagaaaagaggaaagcccacgaatccaggaaacaaaacaaaagcccaaatgcccaacagaatttgagcagatacgtcaattgacaaaatgtatttggaatatttcaatcgccttttccacctaggccttgtttagttcccagctattttcttcaaatttttaactttttcatcacatcaaacttttctacatacacaaacttttaacttttccatcatatcgttccaattttcttcaagggagtagctatacaacattcgacagtttttttgaatgaaaaactttcaattataactactatataattacattgtaactactatataactgcaatataagtaatatgtaactcatatgtaactgaaaaattggatggagcaattggttagttgaacaagcatgcaagctgtaggtcttgggttctatccttgccgcgagcattaggttatttttttccattttttcctccacagcacaaatctcaaagcatatcgtttttcctccacagcacaaatctcaaagcatatcgtacggttaaaaattcgacagttttcacccctcaaaactttttttcctccacagcacaaatctcaaaactttttttcctccacagcacaaatctcaaagcatatcgtacggttaaaaattcgatagttttcacccctaaaaactgtcgacagtaggataccaaatccgtttcttcaaactttcaattttagcgtggaactacacacagccctagaactagaagatagacacctgaactgttcatgggtgggtgggccccggggcattgttatttttagatagcctttcccatcgtttgtaccagatcgcgtggacttgtccttcaccaagtcgtggtcaataaggcagagcagccaatcgagaccgtgctgagaggagtgctggcaccagtaaacgcccctttgagcacggtcccttgcgctttctactcctactttctagcgaggcaccgacgcacctctaagcaagaagcaggcgcgcgggagcggcacggatggccgtgctcctgctgccgtgtctgtgcgtggtcaccgtgctcgtcgcccccgccgccgccgccgcagccgattccctaggctcagcgcagcccttcctagctggacctccagaaccgagcccgcgccgacgtcggcgtcgcaccgctcacgtgggacgacacggtggcggcctacgcacggaggtacgccgccacgaggaaaggcgactgcaacctccagcactccggcggaccatacggggagagcatattctggggcagcgcgggcgccaactggacggccgccaacgcggtagcctcgtgggcctcggagaagcagttctacaactgcagcgacggctcgtgcgccggtgaccaaggtgggcactcggagaagcagttctacaaatgcggtcactacacgcagatggtgtgggcaaagacgaccaaggtcgggtgcgcggccgtgaactgcgatgcggaccgcggcacgttcataatctgcgaatacgatccccccggcaatgtgctgggtgtcctggcgtacggcggatgcggccgcttcaatcaaacaggtgatccctatatatgtcccgaacctacctctaacgctcaaaatataccccaaaatctgaagtattgatgaatgtttatgattatgaaatgtcaaaaatactccctccgtcctaaaaaaaactcaattcctgggtttccgtatctaacgttcgaccgttcgtcttatttgaaaaaattatgaaaaaatttaaacagataagttatgcataaagtattattcatattttatcatctaacaaaaatgaaaatactaatcataaaaaaatttcatacaagacggacggtcaaacgttggacacgaaaaccgaagaattcggtctttttgggacagagggagtatacttcatctcaacaaccctactcatctctcaccaaccgcgacaattaatgaagggcgtgcgttcttttttaaccaataatctacaaaatatttttttcattactattcttttttttttcgtgcaacaaagtttctattttattgaatatgagagtcgttgttgtatgttgttaaccgtagcaaagatatgtttgtctctctctttcatgtcaaccaatattcctaattggcgatcattgtacatgtctatctccatgagaaaactctagaaatagttatattttagaacgaagggagtatgtaagattcatttgattcttcatatttggtagacatatcatctgtcccatgaaaagaaacatgacaaaatacctatgtaatgtggggttgatatgactgccgccagaagttagctagatcgagtttaacactccagtaaaaggttgaacatgttcaacacttcagtaggggtgaaaacgggatgtgtatctcccaaccgcacgtctaacccgaggctcgcgggaagaatttaggctaaaaagcaaaccttagagcatcaccaacagcttacctatctgattcataaaactaattttgaaggattttagtttaaaaaacagctccaacagatcccttactctcctacccgagttttggagttcccttttcccgattcctcgctccgtctatatgcgggagcgaaagtcgctcccaatctcgtactcctgcctctctcctcccgttcctgcgcgtggtagatagcgatctttctgtgcgtgaaagaaaaaaagatggaatgttctatttgtagtttaacagaagggttcacttttaagttttagggattgaatttaggctatctgttggagggaggagtttttttactccttattttcaatttaaagaaacaaaaacaatttttaaggggtattataggtaatctgttggtaatgctattatcatcttatttgatttgttagtaaaaagattcgaactaaatcagttgtctttaaaacttctcttgttccaattttattgggcattgcagcgcagagttcaccgcaagatttcctcaacctccacaacgcagcccgggcaggcgttggcgcgggcatgctctcttgggacagcaccgtggccgcctacgccgcagactacgccgagaagcggaagagcgactgcaggaacgttcactccaatggcccgtacggcgagaacctgttccagggagtcgcccacataagctggaccgcctcggacgcgctcttctcctggctaggggaggcgaagaactacaactgcaccggcaacacgtgcaaagacgggcaggagtgcggtgaatacacccagctcatgtggaccaactccacaagggttgggtgcgcgagcgtgacctgtgacgacagtgcgggtggcggaacgttcatcgcctgcaactacgaccccccgggcaacgtcgccggccagcgtccctacagctgcagccaagccggcatctccttgccagggctggttcctggtatgactctccctgattgtcatctccagcattttcattgcttatccactgacccaaaattgcattaaaaatgattaaattatcagcattgctattttgacgcacgtgtgttcctagtgcattatcactcgcatcgcagaacacttaatatgtgtaatattcttttgaaatttgaacgattgggttttatttttccccctttcatgaagctctaacttatatagttgaaaaaaatgaaatcgtggatcatacatgtgattgatccacagatgttcgtttttcagtctaattatttgtatcagtacacagataaaggaaatggtactaatcagcaggcaaacggcaatagctcaactggaaacagcagcagcagccaaagcagtagcaagagtaaccctgcaatcctgccaattgtccttcctgtgtcgataggacttggtataatctcagctatttcaatatgcctgtggagaaacagatcaagtttgaagagaaggcaatcatgtaagcatcattacagtactatcaatacaattacaatatgttatagctttctctctctggcctctacactctgccctgaaagtttcagagaattatgttgttcattggaaaaatcttatgacctaatcaatatttatctatgttcttttcaaaaaaaaatatttatatatgtaacatacataccaatcaaaatagatgttctctctaacctctattttatcagatctaataaaaaacaattcaattctctttttgttaatttcatacagcttgttcagaggaagttgaagatattaaatcagtgttgttggacccatcagtgataagatcagctacaggtaattttgctgaagaaaacaaactaggggaaggaggatttggcaaagtctataaggtgatccaaaaataaatccagtattgcttctttcagcttcctaatcattgtttctcaattttaagagagctcattgttctcctaatcaagaaataaaatccttgaaacaggataaaccttattggattgaatctacatggctcacattaaatagaaaagccaccgtgatatattcgaaaaattcgcattaataatctcactttgtaattgacctattcactgagtttcgacctgtaatccctgtaataattagatgtatcttcgaatctaaggccggaataaattccattattaaaaaaaatccacttgagtttcgagcttttggtatcctgctataaggctagtttctacctggtacacttaatactgccatgagtagttgcagatacatgtagccaatcgtataattgttcattaatttatgttgttatttttcagggcttaatgccagatggtcaagaaatagcagtaaaaagactagcaaaaggatcaaagcaaggtctgcgtgagctaaaaaacgagctcttgttagttgctaaactccaacacaggaatctagttaagttactaggagcttgcctaaatgaagaagacaagttgcttgtgtacgagtacattccaaacaaaagtcttgacacctttattttcggtaacgaaatttctacttcatttcttgtttcaagtactcttgtatttcactagttttattgatttctatttccacctttctatttaccaaacaagtaataattgaaacaaaagaaaaaggaatatatgtatggtgcttctcccctatctgggtggtttgtgaagttggaccttagatcgcaatgggctcaaatgagctacataatgcatgtcgaataaatatacaaagaacaccatatgcttaatacaatcataaaaatatcctgcacagctacaaaaaggaaaatcgcattgaataaaactcttcccaggcgttagctagttcagacatgctaaaacaattgatgaaaataaccattttttgcaatgtttacctttatcactcacatgcaccatattggaccttgaaagttagtaacaacttttatattttgctagcatatataagatgtactttttatatgcaatgatttatttacaagatttaaatatagatgacaaaaagcgtgaacaattggcttgggatgcacgttacaagatcatttgtggtattgctcgaggcttggtatacctacatgatgagtctcgtgtgaaagttatacatagggatttaaaaccaagcaatatattacttgacatggatttgaatcctaagatatctgacttcggcttggcaagtgtttttgagggagaccacacaaatcatatcacaagacgagttgccggaacctagtaagtatatgtgaagacaattatgctagttctagttgatcattggaaatttttacctcctcccagagaactaatgttctgctttttatttttcaatatatgcagtggatatatggcacctgagtatgcagttcttggtcatgtttccactaagtcagatatctttagctttggagtaattattctagaaatattgactgggaggagaaacactatctcatctgaaacaatatggactgagcatcttttaagctatgtcagtattttatttacttggtccctattctaaaaagactggctatatgttactatctccgtcctagaatacttatcgctttgagtttttgtttataacttttgatctttcgtcttattcaaaatattatgaaattattttttttgtgattttctttattatcaaaagtactttaagtatgatttctctatttttatatttgcactattcttttcaaataagacgaatggtcaaactttataagaaaaaagtcaagactactaatttgaaacggaggcagtagctttctgatacgtgtcataatttgtgcacaggtatgggagaattggactaggggcacaataacagagatagtggatccatcattgcgctgtagaagtgccgaaagcgagattctcaagtgcatacacattggactattgtgtgttcaagagaatccaggtgataggccccggatgtccaatgtgattctgatgatcgttgggaaatctacaaccttgccagctccttccaggcctgcctttctctttaggctgaatgatgagaaccatatccatcatggtattaacaatctgaatccttcactcaataaggtgacgatcacagaacttgaaccaagatagttgcaagttgcaaccacccagtacatagctatggattaaggggaaattaggaacaccatcgaaatgctttttttttttgggctgactgtgcatcttatgaacacttgtaaattggatatcttcataacttggggatgataacgtatgaggttaagtaataatagtacgcaaaacctgaaactcttttagaagaggattaagtaaaagaaagatggtttcaagcatcttgattttatataggaattaaaagcacaccaaaaaaaaaaacacaatgttacgcacaaatttgatggcaccagagtacattataattaggcaataagcttccaagaggtgctatgatcacatctccagacaatcagtccgcctaattgttcccagaatctctaatctcgattgcatcagcaatctgcccaagtaattcatacctttgtcctcgcttccaacaccccaaaataaatcatgatccatgcggtgatgcctcaacgagaacagagccagccattgacagcagcatcagtcaaatcgggatatgtgaagttgcattttatagctcaatacagcaattaaaaagtatatttcaaataatgaatataaagcaaatgttcgatcattcttaatatgaagtaaatgtacgaaccattaagatagcacgataggatgacctattggctattgtcatcaaaatgttgcaggttttgcaggttttggtattttgtgcagtcacccaccttgtaccgcccattagcccatacagcctaacaggcacctatacagcttaagaactttttagaacaattggtcttgatcattcccaactataatcagcaaaaatcaaaataagcagaatattcgaacttaccaatcttctctttgttgaggccgtgctatattctagcagcctcttcaggactctttgcaccttatttgcttgaggatggtcaacaccaacaaacttgtgtacctgaacaaatttgacagaaaagagagaacctacaatgtggagcaataaggtcaatgcagcaattaaaaagtatatttaattgatggcgaacactgatgacaataataaaaccaaagtataaaaagatactccctctatctctaaatataagagattttggttggatgtaacatatatatatatatatgtgtgtatattatataacgaatttggacaagctgtactgagcgtcttgtcggttctccatatttcctaataagtaaaaacggtttattagggaataaaaattcatttataggtaatatttatttgtagtgacttaaagccaacgctaaaaagaaattaagttgaatatatcttaaaattaactttcaaattaaattttaaattttagcttttgcttcggtttattggaccaaacgatcggactctagtagtagtaagataccccctccgctgctgcccgctaggagaaaccagcaattggcacttcgaaactgaactgcgatggggccttttcacatgagaagcaagcagatgggtggggctatatcattagggattcggatggagacgttgtactagcaggtagaggatgcctccagaattctactgcttttcaggctgaactcacagcgtgtgtatggagttgaggcaatggttctacagctgcaaattgggagaatttccctggaaactgatgcggcaatggttaaacaagcagtaatatctacggactatgatctctccatttgcggtggcttggtgcttgaactgaaacaactgttggtgacaaattttgtcagttttcaggttagtcatatatgtctagagaatgtaatagagtagatcatgtgttagctctgcttggctctgcttgccccgctcagtctgaactagtactggtggcaattccagtttgtatcactcgtttggtcgccaaggatatctcggatcatgagtaacaaaatttcttgtttgctttaaaaaaaatgaacatggtcaagtttttcctattataaataaatttggtcaatttgtcctattataagtcgtttccctctgtttcatatcataaatcgttttgaattttttctacttaaacatttttaagttaaaaatataacaatattttcaacacaaaacaaacatattataatagaaaaaacagtgagtgcagcactatccgtgtcggctgcgacgcagccgcagccctagcagccgaacaggcccatcatttttataatacttaacatcatataatcaaagtgcgggatatcatattttatctacaatcttatacgtagtctactaaatttatttttctcttaatataatttgaaaaaccaattttatttgttgttaataactaatataattttttacttttagctcgattattaaaaaaatattataagttacttagcaattttcacagcaaagcgcggagaatcacctagtctgctcaataatgatgtccaggagccttcgagttttctctgatctgtctagagatggtgttgggtgagctagacgagtagttggttgtattgtaggtcatgcttcgtagtgtgtacaagtgttcagcacaggtggtgtgtgatttttttttcattttttttcttattatagccttcaaatgttgaagttttacgtattttaacatgttttattaatatgaaactttgcgactggaaacaacatcctttaacgtgggacaacaaaaaaaagttgattattcacaaatttattgactatttcagtttcactccttggcggctttctccattataaaccattaaaacccaataaaattttaacaaatgttatgattttttttttgaaattcaattttttgttttaaaaaaaatgatcagtttaccgattctcgcaacctcgaaattttggctatgttgaagttaggccctctcagtcacacatattgtcagaaagaccggactaatggcatatacaatggttgccaataattattgtcagaaagaccggactaagggcatgtacaatggttgccaataatggtctcttagcgttgctaattaggaataccttttgacatgaaagaaatgttagatttaattgggtaattaatccatttaaatcaattaaatcaaataaattccaaggctcattatgctaggaattcatgtgaattcattcttctatgggatatcaatgggatgaagagttttgagaattaatccatttgattaaggaattggtaacttatatcaattagtcctaattgatggatggttgatggttgtgtagtggaggatggttcatggctagttgatgacatttagttgctctattcctcttcctattccattggtaacttacatcaattactcttaattgattgttggttgatggttgtgtagtggaggatggttcatggctagttgatgacaattagttgctccattcctcttcctattccatgactcttactcttcatcttccattcctcttataaaatgggaatggatttgatctcccgcgagaaaaagaagacacactttcatccattttccaaagctgttgttgctacggtaatcccatcccgacgagtgtgtgcacacgcgttgggagagtaggcctccgaaaccacgcgttgctgcgacgtttgcacagacgggcgggcgatcaggtttttggggagcgcaaggcgcgactactcactgttcgtcaacatctacttcatcttcaccaacatgtcgaacactggagacaaggagaaggagactcccgtcaacaccaacggaggcaatactgcctcaaactccagcggaggaccattcttggggtataaccttattacattatttcaattagaagttttactgttaatgtacatcgcaatgtcaacattgtgtcattatgtgattgttgatgcttattcaacgttaagcatgctcatgttgattacattcaccactatcactggatcaaatcctattgtaaatatcatgtttattatcttgttattttggattaaaatatgccgaattatgaccaaatttccaacaatccaaaaacctgataggtcattttcggtagttggctttgctgctgcactgaaaccacatgcctttgatggttcaaactataagagatggaaagcacgtgcactattgtggttgacagcgatgcagtgcttctatgtttcacggggcaaacgaagtgaaccacctctttctcctgaggaagaggctaagttcgaggcttcggattgcctgttccgtggagcattgatcagtgtactcgctgacaacatagtggacgtgtacatgcacatgccttctgggaaggacatgtgggatgcacttgaggccaagttcggagtttctgacgccggcagtgagctgtatgttatggagcagttctatgactacaagatggtcgatgaccgttctgtagttgaacaagctcatgagattcagatgctggctaaggaacttgagaacaacaactgtgagttgccggacaagtttgtggcaggtggcattattgccaaactaccaccttcttggtcggactttgccacttctctaaagcacaagagacaagagttcagtgttcctgatctcattggctctttgggtgttgaggagaaggcgagggcaaaggacgtccggggcaaaaaggttgagggaggttctagtgccaatatggtacagaagaagaaccctcatgcatcccacaacaacaagaaagtcaagcctgatgtcaaacccaaggctgcaaccaattttaagaagaaaagcaagggaaaggcaaagggagactgctttgtgtgtggcaagtctgggcattgggccaaggactgtcctgagcgcaaagacaggaagtctgccaacatgatcattagcgaggacggaggaacatcggggtacggcaaaatattacctacagttctctctgtttttcattcacctgattggtgggtggacactggtgctaatattcatgtatgtgctgacttttctctattttcttcttatcaggtcgggagaggttcctccttgttgatgggaaacgggtcgcttgcggctgttcatggtgttggtacggtcgatctgaagtttacttcgggaaagaccgtgcagctgaagaacgtgcagcatgtcctttcaataaagaagaatctagttagcggctctctattgtgtagagaagattttagacttgtgtttgagtccaataaatgtgtcgtatctaaatatgggacttttgttggaaaaggttatgacagcggaggcttgttccgcttttctttgaatgacatgtctaataatcataatgctgtgaaccatattagcgagaatgatgagtctaatgtgtggcattcgcgactctgtcatgtgaatttcggttgtatgacgcgcttagctaacatgagtttaattccaaaattcacttttggtaaaaggttccaagtgccatacttgtgttcaatcgaaacaacctcgcaagcctcacaaggcatctgaggcgaggaatttggcacctctagaacttgttcattccgatttgtgcgaaatgaacggcgtgttgactaaagggggaaagaaatatttcatgacactgatagatgattgcactagattttgctatgtgtatctattgaaaacaaaggatgaggcattgcatttctttaaaatctataaagctgaggtagaaaaccaacttgaaaggaaaatcaaacggttgggtctgatagaggtggggagtatttttccaatgagtttgcatccttttgcgaagagtttggaattattcatgagatgacgcctccctattcaccccaatcaaatggggtggccgaaagaaagaaccgtactctaactgagatggtgaatgccatgttagacactgcggggctttccaaggaatggtggggtgaggcagttttgactgcgtgtcatgtcctgaataaaattccaatgaagcataaggaagtaacaccattcgaggaatgggaaaggaagaaattaaatctctcatacctacgaacatggggctgtttggccaaggtaaatgtacctatagccaaaaagcggaaacttggaccaaaaactgttgattgtgtgtttcttggttatgctatccacagtgtgggttatagattcttaatagtaaactctggagtacccgacatgcatgttggtacaattcttgagtccagagatgctacattctttgagaatgaatttcctatgaaatatacacctagcacttctagtaaagaaactgtcatgccccatgagcactttgcaccgatagaacacaatgatcaaacgcctgaggaaaatcctgaggagggcaacattgtagatactcgcaagagtaagagacaaagggttgcaaaatcctttggagatgactacattgtatacctcgtggatgacaccccaagaaccatagaagaggcatattcatctcctgacgctgactactggaaggaagcagtacgcagtgaaatggactcgattatgtctaatggtacttgggaagtcgttgagcgtccatatgggtgcaagcccgtaggatgcaaatgggttttcaagaaaaagcttaggcctgatggtacaatcgaaaagtacaaggcaaggcttgtggccaagggttatacccaaaaggaaggcgaggacttcttcgacacatactcaccagttgctcgcttgaccacgattcgagtactacttgctctggcagcctctcatggtcttctcgtccatcagatggacgttaagacagctttcctaaacggagagctggaggaggagatctatatggatcaaccagacgggtatgtactagaaggtcaggagggaatggtgtgtaaactattgaaatccttgtatggcctcaagcaagcacctaagcaatggcatgagaagtttgacaccacgcttacatctgcaggctttgttgtgaacgaagctgacaaatgtgtatactatcgctatggtgggggagaaggggtgatcttgtgcttatatgtcgatgacatactgatctttgggaccagccttaatgtgattgaggaggtcaaagactatctgtccaagagttttgaaatgaaagatttgggagaggctgatgttattattaacatcaaactacaaagaggagatgagggtgggattcacttgtgcaatcccactatgtggacaaggttttgagtcgctttggatatagtgactgcaagccagctcctactccttatgatcccagcgtgctattaaggaaaaaccgaagaatagcaagggatcagctgagatactctcaaatcattggttcattgatgtacttggctagcgcaacgaggcctgacatctcatttgctgtaagcaagctgagccggtttgtctcaaatccgggagatgatcattggcaggctctggaaagagtaatgcgctatctaaagggtactatgagctatggaattcactataccgggtatccaaaagtactagaagggtatagtgactcaaactggatatctgatgctgatgagataaaagccacaagtggatatgtgttcacacttggaggtggcgttgtttcctggaagtcttgcaagcagaccatcttaacgaggtcaacaatggaagcagaacttacagcactagatactgcgacagttgaggccgagtggcttcgtgaactcctgatagatttgccggtggttgaaaaaccagtgccagctatcctaatgaactgcgataatcaaacagtgattattaaagtgaacagttcaaaggacaacatgaagtcatctagacacatcaagagaagactgaaatctgtcagaaagcagaaaaactccggagtgatagcattggactatgtccaaacggctagaaatctggcagatcagtttaccaaggggctaccacgtaatgtgatagacagtgcatcgagggaaataggcttgatacccacctaaggttgcataatagtggaaacctgtccattatgatcggagatcccgtgaatttggatggtgaaacaaactattgtgtgactgagagaagagacccttgaaaagggctcattttcatgatgtgcttctcttctttcctgtatggtaggatggcttatgtcttaatgtgatccgagtggcttttccaagcagagatgttgacctgcagaacatcttagaaggaacacacctatatgagttcgactgctagtcacagtctatgagatttgggtgatctctagatactcatgaaaggcctggagtatgacttataagctccaacccgagggaatactaatggttgcctagtatcagttatggaattgagtgaaacctaactgcacaagactgacaattcaaggcatagtccattgttcagttgtggtcaggtgtagctccttttctaggtgaaagttcaacttaacagtcttcaccgaaacactggtatataaaagctgctatggaatagagagcattctcatgagccttgaaaatttggtggggattgttagatttaattgggtaattaatccatttaaatcaattaaatcaaataaattccaaggctcattatgctaggaattcatgtgaattcattcttctatgggatatcaatgggatgaagagttttgagaattaatccatttgattaaggaattggtaacttatatcaattagtcctaattgatggatggttgatggttgtgtagtggaggatggttcatggctagttgatgacatttagttgctctattcctcttcctattccattggtaacttacatcaattactcttaattgattgttggttgatggttgtgtagtggaggatggttcatggctagttgatgacaattagttgctccattcctcttcctattccatgactcttactcttcatcttccattcatcttataaaatgggaatggatttgatctcccgcgagaaaaagaagacacactttcatccattttccaaagctgttgttgctacggtaatcccatcccgacgagtgtgtgcacacgcgttgggagagtaggcctccgaaaccacgcgttgctgcgacgtttgcacagacgggcgggcgatcaggtttttggggagcgcaaggcgcgactactcactgttcgtcaacatctacttcatcttcaccaacatgtcgaacactggagacaaggagaaggagactcccatcaacaccaacggaggcaatactgcctcaaactccagcggaggaccattcttggggtataaccttattacattatttcaattagaagttttaccgttaatgttcatcgcaatgtcaacattgtgtcattatgtgattgttgatgcttattcaacgttaagcatgctcatgttgattacattcaccactatcactggatcaaatcctattgtaaatatcatgtttattatcttgttattttggattaaaatatgccgaattatgaccaaatttccaacaagaaagagaaagaggagagacaaagcatcgttgttatgcataacaacggcttaagggcatgtacaatggtgtctaataacgggctcttttcagagtcgactcttagcatttattaacgaaaagtttgttgcatgaggttggagaaaagaaaagaattataataaaaaaatatttagtgcattaatggtttagaaatcgtattgtctctactattgtaaaaagatagtctctagtgatattaattaatataggtagctcatattagactctacctttatacataccctaacaacgactcttaatcattgtaatatggaaatatggttgcatgaggataaaaaaatgaaaagaatattaacaaaaggaatatttttgaagttaatgattagagactttgtcgtctcaactattgtaaagacacggtctctacataatcttgtattaatcttgtattgtttaagagaccatactcgtcactaccaataaacatgccctattcagcttcgctattttctaattttctaattattaaaaaaaaaaacagcttcgcttttgcagtcggagagacgagttacttacggacggacgggtttcaaaataatccccaatagtcagacggccgcaccaattccaaatcgacaaggtacgtgaacgtactcgtacgtgacgatggtggtaatacgtgagctggacgagaacgaggaggaggtcgtgaggacgccggaggaggtggcggcggcggcggagcgtgagaagatggcgttgcggcgggggtacgacaggatgatcgcgaggcgggtgaagatggcgttgcggcggctggattttgattcccggaaaatcctcgaccggcgccagacaccctacagcgtcgtcgtcgacgagaccaactacaaggacgtcgacgccgacgccttcctggggatccccaaagccccgtgctactgctgcaccctgcgctctcaggaattgcaggaagcccttcttcgtcagcaaaaacgcgattaaattagttatcaggttttaataaaaaagtatgcagaaatctcatagtagcactacatggtttcctcctttactatttattatatgtatagagtaatcttgctgtgaacaatttgttttgggtgatatatgcatcctctatctctgctctgattttatatttgcagaccagaccagtacaacaagatgataacaaataaaattcggcaacgaaagcatctcaaatttctacaggaatttagagagataaagaaacaaatgtttcacaaaattttgaaggcaatcaccataatgatacatataaataccccagatcaaaacgtctgctgttatgatcacctctccagcaaatcaagctggctcccctacctcaacagctgtttgaattgttcctagaatctctgatcgcaattgcatcagcaatctacccaagtaattcataccttcgccctcgcgcccaccgccccaaaataaatcgtggggcgacgcctcaacaagaacagagccagccgttgacaacagcatgtcagtcagatgggaataagttgagaacttgcgctttgtagctctgtacatcacttcaattttgatggaatcccaatctggtcgtacctaagagaataaataattgaaaagaataattattatattgatttacataaccaagcaagattatcacactaaaattgcaaaatacaaattaatatatactagtgaagtagtcattgtaactaggaaactgaggcggcacatattttcagagagaactgctgccaattgtcatggagatcctacagaatattggttcaacgctggaactgtcagagtgcgaggtggctaataggtcatttatttcaactaacagaaaattgttacccacagggaagaacaaaattgtgccaggtggctaatagtcacagacaatcacaggtttcttgtagcaagttatggtaagacaactttcatctaaatataccatattaatagttgaattattgtgtacttcctctgtttcataatgtaagtctttctagcattgcccacattcatatagatgttaatgaatctagacatatatgtgtgactagattcattaacatctatataaatatggacaatactagaaagtcttacattataaaacggagggagtatcttttataaatgttttgcaacttaagaaaggaggaactgcctaagatgtactactaattgtatgcacttatccacttattgcgtgtgcagacaagaattccacaatatcacttgcagaaatactaggggacggtgtacttctggaacggtataggcatgatacctaggtatcatacctgatacccacgtatatcggacctgatacacatgtatcaggcctatactgttccaaccatcctggtctccctctatcacttgagtgacaagggttacgaactattaaacataaaggatcaaggaaacaaactttgctcctcgatgggtagtaattgtctgattggattttgggtaagtgttctttcccatccaaatgatgggactaattatgctgatagtaaaaccaatttggattaagtcacagaaggattggttcctgcagtagcacaacatgaaagacaggagatcttttgtggtagggccagtttctaagatgtagcatgattttcatgcaaatataaaactcaggacagaaagggagaggcgagctatggttatgtacaagaatgacctactactttgcaacagatgctgctatgctcctgaagtgggacaaatcagtcaatcaaacaggggcacttcggaggcaaaatttggttacaccaagaattttttggtaattcaaatgaaacctaacaccatgtgcaggcaaacccaagggtggaaaatctcttgccaaatttggtattgcaagcaaattggtacaaccacaatacaaacagaactatttttccacgctttggcatttttcaggttttcacactgacaatattagttatctactttgggccttgaaccaaatagcccctcagtatgttagatcatttcctactataacaagcaaatatggaagtaaccagaacattcaaacataccaattcttgaaattctctttgccgagtgcgtcctattctagcagcttcttcaggactcttagccagctttatttcttggacaatctctcttgcttgaggatcatcaacaccaataaacttgtgtgcctgaataaactttgagcttaatgatcacagtgcaaacaaagattctacatacagttcatgatattgaaggctaagataacatttcagtgaatcctgatgaagtgttttttttttcacagcacacaaaaataataaaatgttagagaaaaataaacctggtaatagtgctccactgttggccatgtgaaatagtctccattttcatcgggcatgtgaattggatggggagaaaagttagagaaggcaccaaaggtatcccaagtcttgtagaaggatataatattagtttcatatggagatacttctggatcaactgaaggcatttcatccacagatggtattacaggtgagagatcaggaataggttggatgaatccactcatgagcatgtccctatcaatctgcaccatcgcaaagaaaaagatatagtatccagacgttgtcaacaaatgccaaattatacatatgcctacaggcctactccctccatcccaaaaagaatcaacctaggaggggatgtgacccctcctatgtccacatacattgtcctaggaggggtcacatcccctcctaggttgattctttttgggacggaaggagtacactaacagtttagttaatcagatgttcaatgcaaaattatataataagaaaaggccattagtccaaactgaatgaaaatggtggtatcataagttctacataaacaagggagagatctacaaataaattatggagtaaaaattttaatttagcagctactatgcatacttatttgaactaaaacatagatagttaacctgctcgtaagaaacatcaattaaatcaatcgcttgagtcatttgattcatccctagttcaccgactggtgttggagcattcactcccccaattatttttggagccaagaatgcatacacctgttcaaaaatgtaaaaatcaacactataaatagagttcactaaggacaaggcaaacaaaatgctaattaaggcacaaaactagattaagtctaataaatataatcaatcaacaatcaagtaagtaatacaacaagtgttaacaggctgaggtgcataatgcaacgatcggatatatgtcacatgtggtgttgcaaaacaagtgaatgaagtcatagatatttccttattattctgttgagttggcctctaagagacgtaaaaggcttcaacattattcccaatgagaaggttccttaccagtcgttgcagcattcatattgtagcaaataagaagctgataaaggctaaataaattcgtatccatttagttcatgttcttttcaccttggatatctatagcattagtgaatgcacatagaatgcatatagtgtgaatctaattttaaaaacatttaccttatgaataacacttgcagatatagcagaagctgctagggtcccaccacactcccataatacggagaggtaaccacgatcataacaatatgacataacatctctaggattcagcatgtcaaactccactacttcaacacccttcaaagcaagtttcttttggagatctctccgagcacctctttgtgttgcaactattgtgtatgcatcatgtacattccataaatttgcttcctcgggaagattaagagactgtgacattacaattcgcactggaacatgccccttgacatgcctggcagttaagcgaggatctaaggcacaaccaaaagctattcaattttatggaggagcaatatataaaacatatagtaaatagaagattgcactatccagtcaataccatcaaggcgtactgtatttccacctacaattatagcatcgcttcttccacgcaattcaaatactctgcctctagatgatttgccacttacccaagatgcatgcccactgcttgctgcaatttttcctgccagtttccagtagagcatggttggatacttttgctcagctatagcattataacacattgacagaattaatataaacaaatcaaatgaattatatagcctaccatctgcagtcatagcatacttcaggacagagaacggaacacggaaggcagctcggtaaagtaatggggcatttacaatgaggcatgacttaagagcttcctacagtgaaaactaaaaacattagcaaggctatgaaagagcttcctacagtgaaaactaaagacattatcaaggtcataaaatgaaagaacagatcgataatattcatagtataactaccacaatcacaacgacataatcaaatataccaatacagtataactaccacgagagcatataaatataccgatacagtataccacgaggcaacgacatgttcatattctagatgaaaacacagcttcctacattaaacacaaactgaaactaattaaggtaaataccaaggtgaacactagccgaatagcatccacttaaaaagtaggtacatcaaatgtcagtcataaaaagattattgcacatggtggaggggtttaaccatcaaaatagtaacagcagaagctcaactgaacctcaataaatgaaaatatcaaataatgatatattctatgatactaaattagatactaatacaaattaaccaaaaatgacataacatcaagtgagagctcaagtgctccatattgacttgtagcaataaatttactaaactaaaacaacattcacatgatggtacagtgtacataataaatagaaccttcaaactgaatacaaattatagttacctggcgaaatattatttattgttgtgcattattatcattcttacctttttttggcaatatatcccaatggataatgattttttttattgtagaaaattttctaaacatgttatgacatacccctagtagcttaagatgttgagtagatgaaaaattactgaatagtgacagctttaatctttaacaactactactactactaattagaatattgcaactaatcaaaacaaagaaaagtataatccaggagaaaaccttaaataatttactgtgcagatcctcgcccacaacgtcaacttgaatgccttcatttcgtagtgattgaattgcctttcctctcaggtgctttaaggggtgcctaagaccaaccacaacccttgtaattcctgcctaatagaatgttagcgtaccgattgcgcttcaattttcaaagatatctcataagagacaacataaacaataggtaggactggtttatttttcttttaagagtaatgcacgattcggtgtggccatagtgatgattggacgaaattagctcctatgcaaggtggactaatgtgtaggagctgagacaggagggtacagtagtgtcatcgttgtggctttacccttggagttcgcacgaacagcgatcggtcagcacggcgcaggaaatttgcatcacgatgtaggaatttgaacaatattttcattatattttgtgaattgtgagatgtgcgtgcaaaagaagggagcgacagcgaagggccaaggattagcacctggactagggtggaaacggcagtgctgtccccgtagcagtccccgggctcgaggttgaggtaggccgtggcgccgcgggcgtgctcgccggcctcctgggcggcgaggagctcggcgcagggcgtgccctgcgcgtagaggaacccctcgcccaccacccatgcctcggcgttgtcggtctcgagctggggcctggcgatgacgcacccgaagttggggtgcggggaggtgagccccgcggagcggtcggccgcgtcggcggcgcggcgaaggaggacggcgtcgtgggcgtgggaggcggcgcgcggggcggggagggagaggcggcggaggcggaggtggaggctccggctcaggctccggcgggggaggaggaagagggggcaggtcgccgccgcggcgggcgcgaccccgcacggaggcggatgcgccggaggcatgtggtgtctcgccggcgcggcgaaggctcccccgagtttggggtaggtagaccacgattgggatttggatgaggtgtaaaggaatttttttaaaaatatatatatttgttttttatatttataaaagtatgttttttattttcaagttttgaatatgtaaactctaatccctctcaaagggtatttttttatagggggtaaatactctcctagttccaaaatataaaagattttgaccggatgtgacacatcctactaaatacgaatttggacacgtgttctgttcaaattcgtaatattgggacgtgtcacgtctgaccaaaatcctttatattttggggctgaccaattcatagtattagtatgtgtcatgtctgaataaaatcctttatattttggggcggagggagtattagacaagagagggtgtttagctaatttatatggaacaacttgttgtgacgagttgattgtctcgaactcaaacgagagctctgttatttttccttccaactcaacgagagcacttgggcagtggacacttgtcatgtaactgggccggatcggtatgcatattgagctcagggctggctaggcccaatccactgcgacaagccgaccactccagccactacaaaaggagcagagccaacaaatggagaacaaaacagatgaaacttgacttcttccttccgatgctctctcctcttcaacctctgtatctctcttctcttctctctccaatctctagctatctcttcttctccaacctactgctgattctcagtcttagattccatttcccccatttgtatccccaaatactcatctatcaagtgttggaggaagaattgtttgcttgtgcaggaattcactaaatcacatggagtggatttgtaacaatatggtatcagagccaacaatccgtgggattccaggccaggagacaaggtggatgacacacggtggcagcagtgacgtccagaggctagatccaagcattggagggggttgcactggaggcgcctgccaggtgttcgaagaaatgccgagctggctgggagctggtgcaggcattgctcttcgtgtccaagtgagccgggtcctttacccggtgactggcgaggtactacatcaagtctacaacgactatggagccgtggcagtgcaagtgctcgccactagttgttggggcgttgaggcgctagtctggttccggtcaagctgtgacgcggagagggctcgatctgacaccaatgaacgcaacatttacgatgggtgctgcttgcttgatgtccagcacacgcagtctttccctggaaatggtgctaacatgatgcccaccaagtgttcgacgttgggaccaagttatgccaccaccacatcaggggccaagagcataccagctgcaacagaatgcgtgttcccagccactaaagcttcattggcaccctcaacttcatcaacaaccatggcgactccggcaccttccaccgagaccaaggttgttggggctggcatagacaaggaggtgttgaaatcagaggaaaccactcaggacttgtacactaagatgatggccatgatcgacaaaatgttggagacatgccgtaacaccaaggaggattataccgtgagtgtgggttccaatggagatgccacggcactgagcgtcaacattgattcagtacccatcttatcagaggtcagtaatgaggctaaatcaactcatcttgtcaacactaacaagcttagtatggtgaaagtgaaaccaaccaagggtttgacaaaaagcaaaaaggaaaaggttgatggtgatgccggtggtatggtcactgatgattgtgtcgagtttaccaaggtggataccaagctcatttatgtgttcagaccatttacagatgtgagtttggctttgtgccagagcaattacattggtgtcaccaaccttcctgttgtctcttctgaatgtgaggttcgctacgatgattttgtctcaggagcagatttcacagctagaccgcaagtagtacctccctggagactagcagttccactggattttcgattcttgccatggccagatatatttaatcaaggcagcggaggcgtggtggtgaagctcttacagccctggccaccacctgctcaagcagaagttaaagctaaagtagaaaaactgaatttacatggtcagaaactagagattcagattatcgtaagtctgttcaatccccaaggctaccatagaaggtctgcaattgttgggtgaacgaatgttacaggaagagcaactgaagtgtgaggttgtcaagtccaattggtacagtttttcaaatctttttagttggagatatgatggatattgctctgcctatgcagtcattgggacagctagttccaagctacagtctagctcaatttgagaatgaaaatttactgattcagcaagctatgagctggtgtcggttcaaattatcagctaattatttcctgagcaagccttatcaatggagaaaatatattgtgggtgctccagcttaccaagggtttcattttcaaggaatgataaagcaacaaattgatggtgttgatatgatgttgctatactatcatcaaatcagcattgtatattgcagtgtttctgaagatgtagtgtatgatgtgacatggactcctgtcatgccaagcaaatggatccatgttgtagcaattgggaggacatggctattatctgcttttgccctgataaatttcctagaagctgggactgtgcaattggcagtgaagcttgtgtatgtcaagattgctgagatgacaagaataagatcttgggatccagttattgtcaatttggttactataatagcttgccaaatttctacagaaggtatgtctgttggattatctggtgtgaaggtatggttgttgtttgctctcactttggtgcggttccgtggattggtgaccacgtattatgcaaagttctagagattttcacctgatgtgcattattttgatggtatgactactgggaatagtgtgttgtgggaacctaaactattgccactgtcaattcttttggctgaacctaaactactgcctgctcaagttaaatttagacttgtggttaataatgtgacaagaggactgaaacatcaaagttcgtattgaactgttcagaaaatatgccacaacagtgaagaagggagggagtgatactcttgatctcagctcagtttgcaagtacaagaatgctcatgatagtatccaagtgggcacagtatctagcatttctctatcactgaccatgtttgccgtccttccatccaaaaagcttgtgactagtatcaagatccctaactataattctagacaaatggaggtgcaatgcatccaccagagtgcaagttttgtcacttctattggcatggagtcatctcttgtggttgcattttgtggatcagctggtgcttatgtattagctcttgatgattacttgcagctaccctgggatcctagaggcattgatcttgagcttcaattgcatcagcttggggacaagctgattttcaaggcggagagaatgccatgtaactaggccagatcggtatgcatattgagctcagggctggctaggcccaatccgctgcgacaagccgaccactccagccactacaaaaggagcagagccaacaaatggagaacagaacagatgaaacttgacttcttccttccgatgttctcttctcttcaacctttgtatctctcttctcttctccaatctctagctatctcttcttctctaacctactgctgattctcagtcttgattccatttcccccatttgtatccccaaatactcatgtatcaagtgttggaggaagaattgtttgcttgtgcaggaattcactaaatcacatggagtggattcatagcaacactagattaaacatgagtgttttacattgtaaattcagtatatttgagtgtaaatttatatctgcactgtaggttctaaatctcaccatgttaattaatattgtagctttgctaactaaaaaaggaaactatcaattatacctgattgattcgggaaaaaaatgcaagtgtaaactaacacatgacactaaaaaaggtgatgaaaacacaagtcgagcaatgatggaaaaaaacacatgatggagacgtaccgattaaatgatggaaaaagttattgcaatcagactaaaactatgatgccgcttattaagcagaacagtttagacaatttctagaaacaaacaacattgaatttacttctaaatgtatgcttttcaaagctcgtgttagtccaaccctgtttgtacaatgtgctaggtgtgtagtatttcctctctctgtgcccctatcaaaacaagtgctcacagtgtcaagtctaagcttctactttttctccccccttttatcgtaagaataaaaatcagtttctatcattttcagaacagacgtattgtgcacccaagattccaaagccaggttacaacattaaatagctgatcactgttgttgctagcaacaaaatcaaggacttgcgccactgaacttcacagccggaggagatatcgtccgcattaacagtgtatgttgatcccttgtcatcactgatcttaatgctggaggagcctgagacaacagtgaaggtcaatatgatcaaatgtgcaatcatatgttaaagagagtatatttatctactaacaaattcaaattgcaatatggcacattaagtgcccagcgcaaaagattaattttcaatgagcaaagacttacagttgtaatctgcccacccgatagcttgattttctaaatcataaagaaccagcttatttgaaagcactagatctgaaagtaagtttgcaaaaaaaaaaaaaaaaaaggagaacaacttaaagtaagtggcaaccattagaacagaaataaaacttgtaggggcataaataggtgaacagcacaaagcaatatgcacctcccaaaagcaccatatctttcccatccttggtttgtactccaccgttttggaaccccatgcagtataaattcttctgcacaacaaagggttctagatatttacatgaaatacttactatcacaacttgcattaatgtatcataggaagttctgccacgtacaataatggtagaaagatcataagaaaaaactatattcttttgatgagaaaacaacctaaagttatccaatgtttcaaattttagatctataaagtagaaataatggttggtatttgcatagtaaaaaaaatataaaagggtgtatctttctccaaatgaataatggacagcataaagtagtgtggctgtgatggagctgtcatctgtgcactaaattcaacatgcatgcccacggcctaacataatgtttgtaagttgtatggtaaaaaaaaaaaagaataggcaagagagattattaaataccccattttggaaaagataatcatgtggagaaacaatcagtgaaacgtctccctcaaaatgaaaagtaacttcaggaaatccatcatcgacgctgcaataggaacacaaaaattagaaacatatcatattaccaatgcattataatttgaaccacctaatgtaaaccttgataggcaatgtaaaagggaccattatcatgcgtaccttccagaatattggaagcaactgaagtcttgtaaagtctgtacggatatatcctgatgcttatcaaatacctacaaaacaataatcatgaaaatgtataatgatgtgcacaaatcactctcaactaagaggattgattcagaaaggatttcgtaccatggcaaatagagccttataaaccccctctgggacatacgccaatgttgtcccactatcaatgatggtacctttactgttacctgaatcgaaaatatttgttggaagtcctagtgcggtaccaccaacatcaattcctttcaagatgacattatagtgtggcctagacagtaacatgtttataagatctcagcaatacaaactaatgtaaatgtcacgaatcctcaaaaaaaagttagaagtgaatgtcaggaataagaaatgtacacctctcatgggcatatcagttaatctgttgcatgaaaatatagcatctagcctcttactatacagcggctaatgaactgtggtttctcctacactattgttaaactatgccttattacaagtgatttgtaatgacatgtcaatggctaaatcattccacggtcttttattcttttgcacagtctagcactagaaaataaccattcactcaataagttctatttcagtattttaatcataaaaaactcagttatatgcaagcacaatgatattggaggttaaaagttaaaactttcattttaaagggtataatatattgtttagacattgctcagtcatatatagcaggattgagccgaaagaacgaactactgaagtgctgtggtcatcctcttatcaaatgaatatgcatatgggccatatgtattggtgcaggcatcctggatggctggatctcacaattctatctacagcagcaggtagctgaaccaccctctcgtgtatggagcgctttcaccatttcagcaaaatccatgatggaggtgaaagattaggaaatagttgagagtgcggaaagtggcaagatcgtggaatagttgagagtgttacaacacaattatccatgcaagatgaaagagagtagggaatcattgcgggcataggcagtggttagtggaactggtagctggtgactgatcagtaaagacacaacatattgccactatgcatgagaaggaccaagcttctcatttggctgccatgaagatgtgtaatccagagattaataggcagacaagcttgattggatcaggcaagatttgaatcactatgcttaatcattggcagatacaaacttgtccccaaaccaatattttgatatgtacaaaattttagataatgaaggagtgctaagaaaaccatctattaatatccctaccctaattcgaggagtttttaccttttagcactttgaagttgattagctgtgtgtggaatccataggtataaatgtgatcaatatttagcactgctgggttagtcctttttacaaagaaatgtgatatttcagttaaagttgcagccagatatcccactaaaacatcagcaaaagagaccagtaaaacaactaaaagaactaaacagctacagaagcacattattttagttagtaaagcctggttattaatgtactgtacatctcggaaaattaaaaaaagcaagttaagccatattaacagagaatgatacgattattaatcacatgagaacagcagtacacaaacatgaatgtgggacatggagaagcaaaccgaaattttgacaatcatgctagagagaagagaactttgcacacttgcagttgttgaatactttcataaagcagacacaatttataaaacagtatacaacatttcaaaaattcaatacatgtactccctccatttcacaatgtaagtcattctagcatttcccacattcatattgatattaatgaatatagacatatatatctatctagattcattaacatcaatatgaatgtgggaaatgctagaatgacttacattgtgaaacggaggaagtaatgatttgatacaaaatcattatcttttattttggtagaaaaatactatactatgattcaaaattcaaattgaatgaaacaatataagctaaaagtcataactaagtttgaaattcaaacaactcaataaatgtttgtttgccatctaaggatgaactatcaaattgtctaggcctctaggggaataggaaacactagtcaaaagctctggatgctgagttttttcttcttttttttactcaactagttaaattactatatcctaattcatttggcaaaatccaaatcttgaacagaatatcgtaagtaggaaagcaactaccgatcacactcttggcccatatcattcacaaaagttgatgaaatcaccttcctggtgtaaagtgaagcatcagccagaaactacggacttcttatgccagttaagcctcatagacccatagcagggagacagtcatatactcatatgcaagactatataacgaatcaaattaaacgcattggtaaaaaaaaaaaagaggctctatttagcaagcaacgaagaacgatccaaacaaagtaaacaagggacatacagaagcagagaaaaaaaagagaaaaaaaaaacaagcacataactataattggcagagtataatggcgtacatgtcgggcaccaacggtgttgtcttcactttcggctgcaccacgttcccgatagcgaaaatccccccaccatttacagtgtccaagcaatgcgcaaacatcttccgaacttttcccgcggcggcgagctgtgacagcatcgacgagttcgactgaccaaatccaagaatcccatcgagtgccaggtttgacgaccccaaatccccacccagcttagcaccacacctgcaaatcacgacagaggggagacccccagatcttggcatcgctttcagaaggtttttcacaccgatttccatccacacatgctagttttttttttgtttttcttttcgttttttcgcctgagaagagaaaaggctcacccgaatgagacgctggcattggccggcgtggtctggccatcgccggagacctggttgtactgcaggaagtcggtgacgaagaacccggccgtggagctcccgtccccgtacgagatgctgtactcgcacggcgacgtggaggtgcacgacggcagcacgccgccgtagttggcgacgcagaactgctggtcgcaggtcaccagctccccgctctgcgaccccctcgggtcgtacatcgtcagctcaatctgcaaaactccccccaaatcaaacatccaatctgggcacgagagggggggaatctgcaggggaggaaggaggaatcggaggtcagtagtatcgcaccccgaggttgctcttgcgcgggcagccgtcgcaggagacgcagttgacccagaggatgtcgctgccggtgtccacctgcacgtagtagcgcttcgccggcgtgccgatcccaatccgcgtgaagtagagcctgcgcccccccgtgtgctccccaccgagatcagagacgaacgcacgcacgcgcgcgcgggcgcgcccagcacgactaagggaaagcttcggtaaaacttacccggtctcggtggcgaggccgctgccgccgagggggaggtcgatggcggcgaggaggcggccgtggcggcgtccgtcgtgctcccggagcgccgagaggtgtccctccccgccgtccccgtggcgcgtgaacttgcgctgcacttcgaacaccccggatgcgtccgccgcggcgagcgccgacaccgacagagcgagcagcaggacgaggcggcgcagggaggcgccaggaccaggaggatcgcaagcaccacgcgccgccataggtcgcgcggcctgaggcagctgcagctttgcttcgctaggctggagctcccgccctcgtcgcctcgccggcgacggcgaggaggaggaggaggagaggagtccgcgcctttcttccggaaaaggagggagaggggagtgggaaagggaggaagcgagaaaagaagaggagaggaggaaaagagcgttgatctcaacggccgctatttaaatcgacagcggctaatttttctattggccccttctggcttccatccgatatactccctccgtactccctccatttcaaaatgtttgacacttagtacgtgtttaactatttatcttattcaaaaaatttaagtaattatttattctttttacatcatttgatttattgttaaatatactttcatgtatacatatagttttacatatttcacatatttttttaataagatgaacggtcaaacatgtgctaaaaagttaacggtgtcaaacattttgaaacggagacagtatatatatactagcaaaagtgcctgtgcgttgcaccaggtgattacgaagtgtgtatattgaccaaaattgttgtttggtttagcaaaagtacccgtgcgttgcaccgggaagcgcacagatcagaaaaaatatgcaattaattaaaatacaaattcgttgaaatatttggtatttttaagtaggtatgtgtataattaaataattttacaagtaaagcaagtgtgagaaataaaatgacatttttaaatttaattttattaaattctccatgattagttatgcttgtcagggttatggataccacatacctaatagtagttgactaaatctcggcaggacccaccacataccatgccctatacggaaactggacttcagatatggagggagttccggataaggaaagacaaccaagtcaggtcaagggtccaagagccttatcctctgagaacgattctccaacgacaagactgaaggctagggagagtgtatgactctacaaactgactgatcgaagtcggtaagagagaagacactcatacacaaaacattggtcggtaaatttaattcattttcaatttaccatacatattataacatgtcaccctttgagcattcgctcgggggctctttctatttgatattcttttctgagtattgatttcaggaaaattctattcgacattgacgaagactccatgtctctatggttctacaccaagatcgactaaggtgagtacgacaaatgttgacaaggctccacgcagactctacgccttctcgatcgctcaagaacggttgctggatctcgacaaggaatacagaatgaaaagatggtgtacccgccgagataaaatttcttgacttcaatccaaattctcgattacagcaagacgggagacttagtcgtctgctctgtacttccttggttgacatcggagattgactcagacaaaccctttaggtgcccgcacgaggctgacaaaggaagtctaacgttacctctgaactcaccgagaacggtcatttgagctcgataacagttactccatggtcagcggtcgagaatatgaattcgttcatttgcattgaagtcgggggctactgtcagggttatggataccacatacctaatagtagttgactaaatctcggcaggacccaccacataccatgtcctatacggaaaccgacttcagatatggtgggagttctggataaggaaagacaaccagagttctacatggaaacgacaaggactactcggattgtatccatatttgtttccctagttctacttggacaatgggacacctatgggtataaatacaagcccccctaggaggacaaggggacactcaccatgagacgatcaacaggatcaacatgatcaacagacgagcacctcaatcaacacacccaccgcaatctacgggacaacatacaaaccaacatacgccaagacaagacgccgccggatatcaacttgggataggcatggctattcccctacggtgtccttggataccgtcaggagagacgaaagcgctatctctgatctcgctgggcacggattcgaggaggaaggctaccctgttatcgactacgagtcagacctttagaccgacatatcgacaacagttagatcggctaccccacatattgtactggtgtgattatggtgaataaaagtaactccggctatggccaacaagatgtagggtcattacccgacaattcaggggcctgaacctgtgtaaaaatccttgtctccgtctcttttacctcagtctcgtgtatatcctagcaccgacggtccccatactatgcaaataccagaattacgacaccaaacgtcgacagtgctgtttggaattttattggaattttcagagcttaattgctaattttaataatacaaacatcatttaataattatttaattggaaaaaaaaagaaaatccttccttttaggtttgcttagaaataaacacattcaataactataattgtaaatgcttctaaaaaaatgaagaactaaaaatgaacttctctttttttgggcccgagggacctaatatagacttatttccgactcgagggacctaaaatagacttatttccgtcccttgccggtcggcccatggccttatcaaaaccctaaccctaaccctccccacccctcccctccccccccccccccgcctccacccccctagccgctcggccgcctcccccactcccgacgccgcctctccccctccccctctccccaccggcgccgcttcccctcccctccctccggcggcgctgctctctctcctcatctctcgcctctccccctccccccagccggccgcctctcccaccaccggcgccgcttcacttcccttctccctcccttctcgtcggcacggcgcggcgacggcgggctgcggcggcggtggcggcagtgccgcccttcccccacgctagcggcggcggcgcccttccccacgctagcggcggtggcggcggcagctctccttcccgtctcgccggcacagcgcagcgacggcggggtacggcggagacggcggcgacgtccgtccctccccctcttcctctccctctccccgtcggtgtcgacggcgacgacggcgtcggcttcgtccaagggtgaatccgtcggtggtggcggccaccgcgggcggttcctgtagcggcgctccctccgcacctctcttctcctccggcggcggtgggttttttttttgcaattttttctatcgctattgctaaccgaataagattgtgtatggacgaaaaacggacgaaaattagatgtgacgaccggaaaaatacgaatatttatattagttatagatatagtccgtgtttggaaaccttttaaataaaactcttttaatcttccgcttcctagatggtctagagatttttttttctttttagattataaaaatatatataattgtaaatcagaatacaaattagaagtaagatactataaagctcgattttctaggttttcgccatatggctacttaccatttgcttatcacaatctcaagttccttgattaaagtcatatttcatgatctaagcccaaaaaaatctatgtagagttgtattttagaagactaatcaaacttccaatgtataggtgtattacaccatagacccacatgacgacgaatatttatggttgtatatctctgtatgtcgcggtgccgccacttgtacgtaatattttgactttggtataatatcagtacaatgagtcgtaatgaagaaagaatatttttgcattaatgtgaaataatttttttttcgtttggtcagtatattctgactcgtacatttacttcaatagatattataggtgaatggttttttcaagttgcaagcaataatattattacgtccaaaacgactgatcaggtgggtactacctccgttccaggttataggactttctagctttacccacatttagctttacccacattcatatatatgacaatgttagaaaatcttataatataaaacggaggaagtagcatatattgactcaattttatttgtaaaacgcaaaccacaatactcctaacttactccacagaaattggattccagtactactccactgaactaacagggcggcgagaaaaaaaaaagagcgatggcatttctggcctccgtggaaatttcacaagaacaaggaccgtaacgtgaatatccatccccttcgccaaacggccggtcacgtttcgcaggtggagtggactgataccggtttggtttccccttcgcgaagccagcgcagccacggacgcggacaagagaagccaaccgacgcggcacagtataggagagaagcctaatcccggattattttttactatcattcggtgctaaataaattaatatagtttattcgtagtcgacgtcgagacatcgaccgtatcgtatccgatcacacggtgcgtggcgttgcttacttgttcggttttttctctctatctctctctctttcttttttttttgggtcgcttttgatgtgaacggcatcgagctgcagcaagcggcggcgcttgcaagggacaccttacgctatgcacgcacaaggatcgtccagctcgatcgatcatccgtacacgggtttttccgccggctggttggttctgaccggcgcacgtacgcaggatcgatcgggcagctggcacacgacggcaagcgcaaatcaataatagtgtcgcaattaaattaatccaattaattattcgatgaagcgtcagcccgatccactggtatattcatgggcattctctctctctttttattccgaaaaaagacggcaacatgggtattcttgactattgagtagtactaaagcgaaaacaaatacagtagcaccttgcaaatttcgtttcaagacaggtagaccccgtttagttcccaaaactttttttttcaaaaacattacatttaatctttgacacatgcatagagcattaaatgtagattaaaagaaaaactaactgcacaagtaggaaagaaatcacgagacgaatcttttgagtctaattagtctacgattagtcataagtgctacagtaacccacatgtgctgatggcggattaattaggctcaaaagattcgtctcgcgttataaaattagttttttcattcgggtgcaaacacattttccgacatgcgatcaaacgtctgatgtgacatacaaaaattttcattccccgaactaaacagccccttagtttaaatcgcaacaggggacatgaaactgatttctcgccctcacctttcggccgtgtcgagcactcgagctagcgggggggtgcgctagtacgcgcgccgcggccacggcgcgggaggagacgcgtcagcttttgccgcggccgccgcgtcccgaaacggcaatgcaacttgcagaacggcgcgcacggcgcacctccctcggtttccgctcccctagacagcaaatgccttgataaaccttcggatccatcggcaccaaacccacaaaacctcaaagcgacccggcatataattaaaagaggagttgtacacgattccggcagctgaaactgttgactggataaacagataatctagaacattgcgtgtcggttttggacgttttggtatttagaccatttttttctcactaatgtacaaccttgagataattgctgacttgctgtgaagtaccactgaggactttggattgtgctaatccacgggattggtactaggagcttaattatcttgccggtgtttagggaaactagcaaaatgagtgtgctcctgccaataaattaatactacatccgtcccaaaataattatatttctagaattcaaaattcgtctcaaaataattgtaattctagagtattaattgccccatcaatcatctctcatttaaatttctccttattttaccctcaaccatcttcccactctcacataaacaccatttaatgaggggcacaatagtctttcttctcacaccttaatatatgctaaacaatatagaattacaattattttgggacggaggtagtaggtcacaaataaatagttctcctatcctgatttgatcgtcacctatgagtaggtacaatagtatactataagtcagctataaatatattttaaggagttaaaagagaagagaaaaagacagtaggctatagatttgtagccagctgcagcacggactccaagatacatatgtgcatgacatgtgggaccagacaatatataactattgtatgaattggctattaaattgactataaatactttcgagccaatagttggctatactattaaacttgatctaatatttttaagatattttaaaattatcaccatctaataaagttttgtttgtgcaaagagtaaatatgtattgtggaatgccttggatgaatgagttcaaccaatcaagattacgcattctctcgcacatttctctacttagcgctgaatggacaagtcgttttccttgagaaggatcacccccgatccccttaacccacatataaagggaaccttaatcttgtgcacgagtgacgactcacgtacgctaagccattcccaaaaccctaagactaccgatcctaattaaaacgtgttgaagggcgaattcccatcaccattgtcgcaccaccactactacaataccgattcttcacgattttcgcgtgctggtgcaccacccgcacggaaaaacaaaaaattgaaaaaaaaagaaaaaaaacctaaccctaatccgtcgccgccgttgcctagccgaggcccgccgccgtcgccctccacggtcgccggctatgaatccgccgcccgctcccgtcgccggcgccggatccgtagtcgcacatcgacacacaatagacctcacatcaattccaagaacacatctcacatgagtaacaaataaactccaagaacgcatctcacaaatcacaaagagtcacaaagagtcacaaaataacaaagagagaagagggggagagatggatccgccggtcgccgacaccgtcgcacctcctgcaggtggccccacctccacgccggccgcacatcccaattggcgttgcatctccagatccggtgcaggctgcctccgtcccaccgccgaggggcgcgggccgcctccctcacactgccacatgccaccggatccgccgggcttaaggcgcccgcactggataatacgttttcccgtgcgggtgacagcctggcgccggtccccctattttcccgtacggttccatttacggaccacatggaaacaaaagggggcagcgctcaagaaaatggatcatgtagtagtgcgcagcgttcctatcgcagctgtcgcacggtgttcccatcaccggcgggcggcggcctactaccactacaccaacgtaattcatggcttcatcaagatccggtcagtaaaccaccaaattccacataagaaattagatgatacatgcatagcctaagatcatgtttaagagttaactctaataaatataactgtattacttctaaacgttgattcgagatatctaaatataaattgattattaaagtttgaatgcacgaacatctaatattcactcattttgactagaagaaatatatttgattttccgtcaaatatgtatatcgctcacttcaaaggaaaaactaaatggttgtagtacagatactactactaggtgtatataatcggtcatcttggaggctccatcttaactgcgattttggaatgtcaaagaagataaaaaagcagctagtggttctgactttgagggatgaattcttgcagtgaacctttcaagtttcaatcaagctgttttcaaaaaaaaaaaaaaaagtttcaatcaagccctttctagtttctaccgttgttcgtgtgctgcgaacctgcgacagatctctaccgttgacttatccatcctgtgataccaaaccgatttgactatatgtgcatgcatgttaggccagttacacattcttctggacggtctgcccaccggcaaacctgactagttcaatatgggcagtctcagtgcatagaatttattttatcaatgttatgctagatagaatgaaagaaattgttcacctaatacataaataagtagtatctatatttgacatctaaacaattccacattatttctatgcaatcatcatttcaattaattgacgcttgtatactaagaccgtgttcttcccctagttttccgcgcacacgctattcaaactgctaaacggtgtgtttttttttcaaaaaaaattctatatgaaagttgttttacaaaaacatattaatccatttttcaaaaaaattagttattatttaattaatcatgcaataatacgtgcttcattttacatgtcccagagaaggtgttccgagttcccaacccctcctcccgaaaacaacctaaggtgtatgcttcagtaaaattttggtgcagtctttgtggttggatttcatgttaaagcaaggtctcctgcatgacataagttttttttgcgggctaatataacccattattaaaaaaatgacctaagtttttcttgtctctccgtattaatcgtaatgcatctcaatttttatcctatgtgtcatgctatttaactgcacaaactctagttgacgtggagcgctgggagtgcaatttacattctaattttgctaatgattgttcatacacaaaatttgtataccagaatctggaatataaccgatgtgagacaattataatttgaaaaaacagagtcagagaatcagaggactgcagttgtttctttctgtataaatcatcagccaaacattttttttaagtgcaaagtcaaccgtgtatattctgtaaagagtaaccagtgagtaattacagaaaacattactaatacaactgtccgtaagggtcttcttggacattggatggaatgtgtctccctcataagagtagcgatcgaattcgtaagtactccagcatatgttccccccccccctagctttcagagaattgaattatttagagaaattaagaagttgactggcagcttccaagaaaaaaataacaaatggcaggcatcaaagccgagatgtactgtttacaacttgccgattgactgaagcacaaagcacgccacgcgcccacgaccatacgagtcgtcgtttgttaccaagtgacgtacgtgtcaggtgcatcctgatacggtacggatcccccaagaaaggaagaagaacattactagcatcgaaggcttggggaagctgattgcaaattgtcgatctcgagcgacctcaaatcacatcgtcagcgtcgaagagtttagtcgatcggctgccgttctccgccgttggcccgtatccgaccgagcgttgggtggtgggtactgaatgttgggttgcgccgcagaggtgatttttcgtctgggcttctcgttcatctgtactcccttcatgggccagagctttggttctgtcgaatccgttcggccggtgtttgtctttcgggaataagtccactttgtgtccctcaactttcattcgtgtttgcttgacatctcttatctccaataccagaaatcttcacccctaaactatacaaaaccgtatagtttgagtcccataacagtatggatgactggtttcgctgatgtgtggcatcctagtcaacaacataaaaataaaaataatatgtggggtccacatgtaagtgaagtgagaaaaaaaatgtggagcccgcatgtcagccttatcatctttcttctcttttcttcccaagcctgggagagggggggaggcagctggcaggagaggggggagaggcgactggcgagcctaggagggagagggggtagagccggctggtcgcaccggagggagaaggggagaggcggccggtgagcctgggagggagggggatgcagcgatgtcggcgcaagcttggaggccgattgcatcatgcggtggctcaacgggaaagagccgccctctgcgatgctcgtctccttggcagcggtagcacatgggttggagctgagtgacacaaccttcatgcacgcgagctggtggtggaaagggtgggcgccgcaatggcacgtgtgcatcatcgtcgagtgagactgcagcgaacatggctcccaggcttgctgaccccctctcccgcaggcacctccccctccctcccaggctcgctggccgcctctctccccctttcccactggcgtggtcggctgcctctctccccctctccctctaggcccatcgaccccctctcccgccaactgtgtccccctctctcccaggcttgtatggagaaaagagaagaaaaatgatggggctgacacgcgagccacacatttttcttctcacttcactttacatgtacatattatttttatttttattttagtgactaggatgtcacatcagcgaagccagacatccatattgctatgggacctaaattgcatggtcttgtatagtttaggggtggagatttctggtattggagataagggatatcaaacaaacttgatgtaaagttgagggatgaaaagtggacttattccttgtctttctaatcaaccgatttatggcccaacaaatgcgctagccagctttcggccatttctgatcaagttgaatggccggtgattcgtagaacaagcaagctgagttggggcttttctttgtgattttcctcggttctagacttctagttctactatctcacttagggtgaaatggtcggaatcgatagcggctattcagaaacgatgatcggttgactgataattgactatatttatcatttaaaatatttattgtcgacaccaatacgatacgcaagaaattagaaccgtcatgccgcctccgctcccgaaccgcaccgctccgtgtggccatctcctcctcccacctcacgctccactgctctccctcccatgcctcccttcgactgagcgtctgctcccatgcccgcgcacaaaatcagggtcgtccatctcccccagactccagctcggccgccacagctgcctcaccccgtgccactacaccaaccgtgcggccgtcccactactcggtttggttacaaggaatgcaaaaacccacgtcttgttcaccgagaaaaggcctgactattgagctggcccattagcaaaggcattgccaaaacaacaaaatggacaacatcgagttcccatgtcggacatcatcagagcccaagttacaaaagcaccattttctgcacctagctaacgccaacacaacaggcacatgagtccaccaatggccatcgctgcatgggtaaggttctctagaacaacacccccatgaaggacgcgacgtgaaacgccgtcattgctcgtccagaaacataatcaagttatttcctccccgcacgcactcccgcactcacgcacgtatgcccggttcccacgcactcctcccctcctcggcggtagcgggcgtcggcaggcggcagcggcagctggagggaaggaggcatgcagtggcgcacgaggggggaggcagcggcgctctcccctcccagatccggcggtggcgggctcgggaggggccgttcgtgggcgggagcggcgccggggggctaaggtgtggacaccccgagtattataccatccagtgtccaacgcgaccaccacatattattggagaagtgggatccatacacgcataaatagccattcgtcctcaatgtgtccatgatcgcggttgacaaccttctgttataataaccggaatgtcgagtagtgagcgcaagacataactgtaagatagcttgccagtccactctgtcatatgcctgtcaaccactcgaaggtggcgaccaaaagcataccccagtgactcgatccaaagtgctatccccgattatctcaagcgatcaaaacccgttactcatgcttagctagtccccaggaatgcgactagcctcacacttttatcgcaagcaattaataaacatagcaagtaccataatagggttaaagtgcagtgaggtacatgacacataatagggtccaaggtcccaacatacaacacataaatatagcagcggaagtctcaaatagagttcataagcaaaagataaaaccggtggtgccacaatcccactagggcaaaccaaccgggtaagagccaagctgcaagaggtcactcattgccctcgtcgccctcggcagagcaatgaccacacaagaagtataactcataaccggaatcctctcctgaaattgcagacaccgggttaagtacaagattgtactcgcaagtcttacccaaaattgtatatacataagggagagagaagtatgcaagctttctagcctatagtgggtctctaggttcaacatttgcataaagctaatttttgtaagcaattaatgagtaaaataagcaaggacaagtaaatctagcatcattttaatttatggacagtaagtatataattctgaaatgtataagcaaatgagcccaaacggcactctcatcatcaaccatggaccaccaaagtccataccaacatggcacaatatgccaacaccaccatcaaacataatcccatccataataatccacatttgatgctaacataactgactaacacatcaagcattgtccataaccgaggacacgactattcgaatagattatactctgatcagaggtgtacaactggacccacacgaaatgaacaaggatcaaaagctacacaccccgacgagtgcggtacacgagtgatacaagctcattacatgcctttcctaatcccaccccaaccatctataccacgtcggggttcccgacgactcagtcacgtgcgtgcatgatgtgaccaaggcgggcgcgccacgcgggaggcacccccggccaaacctaggcacccgaggccctccaaaggctacctgcctcacgactctccaacgtggtataaatgatcacagtagaactagtaagaacaagccggtcccaaataagacatgtggtaagtacgtaagatgcttgattagatgtcaaaatgttcggtccttaacgacctagacgaggctacttgcatcaggggaaaccaacctcccatcatcgtcctatcacccgtccaagtccaacatattttatcaaccattatttagtgtaagtgctcaagttttatgcccaataatgcaagttgtctatataccacaattaatagcactgtccatccctatagttctattaacactaagcatggctaagcattaatgaataagacgtcccaagtaatcccaactagtggtaatagggtataaggacaacaatatcacaagaactaaatgcataaataggttctacccatacaccataaaccgacaatattaatatctaggcaatgcatgcatatatatacgtatagattgcaaccaaatcctttttagagaaagcataggttctatatgctaaggtgcttgccttgctgctgagggtagtaactatcctccttgggatatggctcgttactctccggaatctccgaatctatcgaaaagaagcaatatgcgaataacagccaagtaaacatgcacatgtaaaatgatcaataaattatgaataaatacagtgggtagatcatattttaacttgaatttaggtgaaagaatcatcagattatcacttatggtttgggagatatgaaaatgacaagatctcaggtgctgaaaatggcagttctgaaaattttagtgtttcctttagagcattacaagcaacttgcaactcaaaccaagttttcataataatgattatttttagagtaaagtacatcactcacgggtccggtcctaagaaaatatatttcacagctgtatgtgttgtcattatttatatatgggttttacaagttaaaatcatgggaatgctaaacaactactaaacaagatttaagaggtagttttgccaaaaacaacaccacaacagcaaagagtactaaaatataagctcaacaaaattggtttcacaattttagcttttaccaataaattcttacgaatttattaagagctagaccacacaagggatacatatagatatttatgtttttactgggaaaaccagtacaaaagttggtcatttttattttacaacattgaatatcacgtttttcttaatccacagaaattttgttcagctcaaacggaattcagatgaattttctacacatttttgaatttagtacaatttcagcgcatgttgaaaacagttttccattaatagtcctcgaacttcctggatattacagagcggtcaaggctacagtgctatatgtcttggtctgtttttttttgggaaagaaccctcaagtttatctaattcaccgatgaggtccctggctcgagcttacggggaggcagccatgactgggctcagtctagagcttgccggcagcgaacagaggctcggatggggtcgagttcaacagagaaactgtagaggaggtccatgcgaacacggaggtgtccgtgctgatgaaagaggtggtctatagctcgtgaaaaacaagctacagcggcggtggttcttggaatgtgcatgcatgtcgagctacagttcggaatgggctatatgggtgcatgcatgggttgtttaggggtatgcagtgtctcaccgtgcagctgaaaggggtcggagaggtccaggaagcagcgatggcgttggagatgcccggcaacacaacaaacacgatgacgacccgagaacgactagatctggccataaaaaccccaaataaacgtttgaatgagctagaacattgcatgcagagtctttttggccagggtaaaggatctggagctcaccaaatggaggaaaacaaaatgctgctgctgccctgcaggctgaaaccaccactcttttattccttctcgatctctctcaactctccttgcacattatgttgggatggatggaaagcttggatgatggggattgttgtggtctaacatgcagggattgatcttgagctattggatgggatttggggaggagaaatgagatgagcttgatgaggaaaagaaagaacaagcaagggaagtgaaaggggaggaagaaggggttttcctcttcccaccttatgtcctgaggtggggagaacgcctaagggtgggttttgggctaaagaggcacccaaggtcagtgacaagtgggcccaagtcatggtggtttaagaggtaaggattggaatagaggtggaacaagaatttgggcagattttcagaaattttcaacaattttacacctcttgcactatgacactcagttagttcaagaaataatagtgatagaattttatcctttggtgtggagatagatctggacacctagtttccatttttcaaagtttcactcaaaaattcgaaatattttaattctggtgaaaagatgaaattggttaggctgaaagttggtttgaatttttaggaggcctaaacagagagtaaaaattctacaaaatttatttgttggtgatgaataaactagtatttgaataaattattacacacgtacacttctgttcaaattattgtttaaatagaagtggtttcaattttatcgattagagttaattttgttatcgcctatgatcaaattacaatatagtaaatatgaaatctaaaggacaataaatgcacttctaaatacctggttatgaatgtagggctgttacaaagggcttgacggccggcgccctacccctcctccttgatccgtccgccggcaccctccccttccagatccagcggcggtggctgcaggcgacgacggcggcagggggctgagggcttgacggccaacgccctacccctcccagatttgtcagccgacgccctccccctcccagctccggtggcagcgggcttgggagaggccggtcatgggtgggagcggcatggcgggcgacagtggcggggggttgagggcaacgacggctgtggacggatccggtggtggggaggtcggcggcggcaaatccggcggtggggaatgctgtgatggcggagcttggcggtagggagggcgacgatgacgaatccggaggcagggtactcggtagtggctggggaactccggatccaccgtgtgggctctggcgactccaacaacaacgatgggagggggagggtctggtggcagtgtgatgaggacatcccttccaacgatacaaccacgcctattgcacagcaaggaccaatgactagagctcgagctcgtgaacttaattatcaggtaaagtcattcctagctaatcatacaagttcttgtcagaattgggtgctactaaatggttgttatgatctacttgttgttaggaatatgggagaggaaccaaatcgcaagcagcactagcagcgctgatttgatgaagtcaatgctcttcactccggagggcaaacggggcaaatgagtacttgttggaaagatctcgtcgtctactttcagctatgtgtggcctcaccatcaactttgacccaggctgctcagaatgacgaaaatagttctttacatcagaaacttgggcttgggccttgtatcattacagcccattaggggtccacaaaacctagggtttgctcccacctcctctcctggtcattcctccacctatataaactcctagcagccaccattttgcactttgggttttgttttgatgtaagtttagctgcagctacttccttgtactcgcgtgtgtcggctagaccacccggatacttgtattcagaaccccattttggtttgtttaagtttcatcatttgacaagtgccgtgagctgtttccttgtcagcttgttcttgcttgttcttcgattgcttgcaggttcaaggttgttcttggcacggcaagaacagcaataacgtggagtcggtgtaccggttgctaaggcgcagcacccctgtggtagttgtagtcggaccgccaacgtcgtatccttccccaaatcgaagtttatcctcctctcatcgaaagatcgggaacccccgttgctgcatcaagtggtatcagagctcaagttgctcggtgagagattttatcacttctttgtttttacctacagcccaaaagaaaaaccactaaaataggtcaaacccgaaatcaccaaaacatgttgagcctttgctgttttacttagtctttgcttgctgagttttcgattgcatcgattggttgagttgctggttctagtagtttagtcctttagagtttcgagttctgctcacgaattcgtcaccgcaaacacttccaccatcacttcatttatcttcatcccgctgccaccatcaccaccatattcaccacgaaatccacctccaaccccaccaaatttcgtccaccacaaccagcagcaccctcatcaccacatcagccacccccaaatgcatttattgctgcctccaccaacagccaacccttttgcaactttttgaagtgaatcagcccttcccaagaaagcatttaagtgctctcacttttgacttgttggctgaatcatgtaactagccaaccaacccatcattacttcttgttttgacttgttggctgaagctttgagcttgctgtacaaaaaaaaagaaagaaaacaaaaaaaaagaaagaaaaaaaaatcagaagtgaagagaaggaaaaaaaaaggaagggaagagaggaagttgttgttgttgctgttttgtttgtgttattttcgtgctattttgagtggctacgcttgtgactagcctcgcgtctctaaagggttttgcctaggaccagcacaataccatcgttgaatgattattcaacttgctttgattaatgtggttctagctgtatcttgatattacttgcagccacctatagctccacaaatttttatctactatatcacaggatcgtgcttgttgtcggctccggtactactaaccgttgttgctgttcttgttgtttgccaacgccttttacataacaaagtaagaacatgtaagaactcgtttgcacaagtttggtagaagtggagatggacaacacctagctccaatagttgataggacatatttcttgtgaattgtttcttcccattaaccatgacaggaggatcgggggagcaccctcaacattcaccacgtacgaggggcatcatacaacattttgagcgccaagtgagggagcatgctgaaggccttgatgaggatgttagggtcgccaatgatcgccttggtcaattggaggctgctcaaattgacaccaactccaagctttcctcattggagaggtcccttgtggctgtgaacacttctcttgcagatatcttgaatacgttggagagaatgggccaagatggtcatgatggatcggctaggcgcaaccacaatggccatgatgctaatagcagcatcgcagcaagggaagaactggagtacgctgctgacactgagcatgatgaggaggtacttggtcgtccacaaagacaactgcgccggcagcgccatggcatgggcgctccaccacggcgggaggtacgtgataatgatgattctttaggcaagatcaagtttaccattccttgctttgatggaaaatatgaccctgatgcatatcttacttgggagttagccattgatcagaaatttgcttgccatgattttcctgagaataaacgtgttagcgctgctactagtgagttcactgattttgcatccatttggtggagtgaatttgttcgttccaatccaaataacactccccaaacctaggatgcaatgaaaagagtcatgcgagctagatttgttccttcatatcatgcacgtgatttgctgcacaaattgcaacaacttagacagggaaacaaatctgtagaggagtattatcaagctttgcaaacaggaatgcttcgttgtggattggtagaaaatgatgatgctggtatggctagattcatgggtgggctgaaccgagaaattcaggacattctagcctacaaagaatataattcaattaatcgtttgtttcatcttgcttgtaaagctgaaagggaagtacagggacgaagagctagctttaggactaacatttctgcaggtcgtgctagctcttgcacatcttctaacgctgctgcaccgtcaactcgagcagcagcaccatcgtcctcaagcaacaagctgcgtccctctacaacaaactctacaccatgcccgagtgaaccaacaagaggggttgctgctacaccttccaagagctcatcatcagtagcttcatcaggaaggacaagagatattcagtgcctacgctgcaagggctatggtcacgtgcgcaaggactgcccaagcactcgtgtaatgattgtgagagctgatggtgggtactcctccgctagtgatttagatgaagaaacctatgctttgcttgcaactaacaatgcaggggaaggtgacgcgccccaccaagatgaggaacacattggggctgaagctgcagagcactatgagagcctcgtggtgcagcgagtgctaagcgcacaaatggaaagggctgaacagaatcagcgccacaccttgtttcaaaccaagtgtgtgatcaaggaacgctcttgccgcgtgatcatagatggaggaagctgcaataatttggctagtgctgaaatggtggaaaaacttgcattgagcacacagccacatccacagccctactatattcaatggcttaatagcagcggcaaggtaaaggtaacacgattggtaagagtacattttgccattggttcttatcatgattcaatcaactgtgatgttgtgcctatgcaagcatgttctatgttattaggtaggccatggtagtttgataaagattctttacactttggcaaatccaatcaatactcctttgtgcataatggaaaaaacttgtgttacatcctatgtctcctgaagttattttaaaggatgaacttgctagagctagcaaacaaaaaaatcaggagcgtactaggagtgagcatcttattgcggctaatgaacttgagaagcataagaagaaacccaccaactctgttcaaaataataaaaatgagattaagctgaagggatcttgtttcattgcaacaaaatcagatttggatgaagttgacactgacactgttgtttgctatgctttggtttgcaaagaaaccttatttccaattgaggatactcctatttctttgcctcctccggtcactaaccttttgcaggagtatgctgatattttcccaaaggaggttccaccggggctgccaccaattcgagggattgagcaccaaattgacctcattcctggggcctctctgccaaaccgtgcgccatacaggaccaacccggaggaaacaaaggagattcagcgtcaagtgcaagagttactcgacaaggggtatgtacgtgagtctcttagtccttgttctgtccccgtgcttttatttcctaagaaagatggctcatggcgcatgtgtgtggattgtagagcaattaacaacatcacaatcagatatcgtcatcctatccctaagctagatgatatgcttgatgaattgagtggttcacttgtgttctctaaaattgatttgcgtagtggttaccaccagattcgcatgaagttaggagatgaatggaaaacagcttttaaaactaaattcggcctatatgagtggttagtcatgccctttggtctcactaatgcacccagtactttcatgagcttaatgaatgaagttttacgtgctttcattggcagatttgtggtggtatattttgatgacattctcatatatagcagatcaataaaggatcatcatggtcatttgcatgctgtttttgatgctctacgagatgcacgtttatctggtaaccttgagaagtgcacattttgcacagatcgagtctcttttcttggctatgttgtgactccgcagggaattgaagtagatcaagccaaggttgaagccatacatagctggccggttccaacaacgatcacacaagtgagaagttttctagtacttgctgggttctaccgccgctttgtgaaggattttagcaccattgcagccccattacatgagcttaccaagagaaatgtcacattcacttgggctgcagcacaaaggaatgcattcgacactttgaaagataagttaacacacgctcctttactccaacttcctgatttcaacaaaacttttgagcttgaatgtgatgctagtgggattggattgggtggtgtgttgttacaagaaggcaaacctgtagcatatttcagcgagaaattgagtgggcctagtttgaattattctacttatgataaggaattgtttgctctagtgcgaacattggaaacatggcagcattatttatggcccaaagaatttgttatacactctgatcatgaatctttgaaacacattcgaagtcaagcaaaacttaaccgtaggcatgctaaatgggttgaatttattgaatcttttccatatgtcatcaaacataagaagggaaaacaaaatgtcattgctgatgctttatctagacgttacgcaatgctatcccaacttgacttcaaaatttttggcttagaaacaataaaagagcaatatgcgcacgatgatgattttaaagatgtgttgttgaattgcaaggagggaaggacttggaacaaattcgttctcaccaatgggtttgtgtttagagctaataagttatgcattccagctagctccgtgcgtatgctattattgcaggaagcgcatggtggagggctgatgggacactttggtgtgaagaagacggaggatatccttgctgatcatttcttttggcgtaagatgaggagagacgtggagaggttcgttgctcgctgcacaacatgccaaaaagctaagtcacgccttaaccctcatggtttgtatatgcctttgcctgttcctagtgtgccttgggaggatatttctatggactttgttttagggctgcctagaacaaagaaggggagggacagtatctttgttgttgtagatagattttctaagatggcgcatttcataccttgtcataagagtgatgatgctacacatgttgctgatttgttctttcgtgagattgttcgcttgcatggagtgccaaacaccatagtttctgatcgcgatacaaaattccttagtcatttttggagaaccttgtgggctaagttggggactaaacttttattttctactacatgtcacccccaaactgatggacaaactgaggtggtgaatagaacattatctgcaatgcttagggctgttttgaaaaagaatattaaaatgtgggaagaatgtttgcctcatgttgagtttgcttataatcgttcacaacattctactactaagaagtgcccttttgagattatttatggccttctaccccgtgctccaattgatcttttgcccctcccaacttcagagagagtgaactttgatgcaaaatatcgcgctgaattgatgttaaaactgcatgagaccactaaggagaacatagagcacatgaatattaagtataaacttgctgggagcaaaggaaagaaacatgttgcttttgaacctggtgatttggtttggttgcatttgagaaaggataggttccctaatttgagaaaatctaagttgctacctagagctgatggtcctttcaaagtgctacaaaagattaatgacaatgcatacaagcttgagctacctgccgattttggggttagccccacgtttaacattgcagatttaaagccatatttggtagaagaagatgagttagagtcgaggacgactcaaatgcaagaaggggaggatgatgtggacatcccttccaacgatacaaccacgcctattgcacagcaaggaccaatgactagagctcgagctcgtgaacttaattatcaggtaaagtcattcctagctaatcatacaagttcttctcagaattgggtgctactaaatggttgttatgatttacttgttgttaggaatatgggagaggaaccaaatcgcaagcagcactagcagcgctgatttgatgaagtcaatgctcttcactccggagggcaaacggggcaaatgagtacttgttggaaagatctcgtcgtctactttcagctatgtgtggcctcaccatcaactttgacccaggctgctcagaatgacgaaaatagttctttacatcagaaacttgggcttgggccttgtatcattacagcccattaggggtccacaaaacctagggtttgctcccacctcctctcctggtcattcctccacctatataaactcctagcagccaccattttgcactttgggttttgttttgatgtaagtttagctgcagctacttccttgtactcgcgtgtgtcggctagaccacccggatacttgtattcagaaccccattttggtttgtttaagtttcatcatttgacaagtgccgtgagctgtttccttgtcaacttgttcttgcttgttctttgattgcttgcaggttcaaggttgttcttggcacggcaagaacagcaacaacgtggagtcggtgtaccggttgctaaggcgcagcacccctgtggtagttgtagtcggaccgccaacgtcgtatccttccccaaatcgaagtttatcctcctctcatcgaaagatcgggaacccccgttgctgcatcacagtggctgcgagcgacgacgacggcgacaacgaggacggcagtgagctagggtttcgggatttttattttttttcgattttttctttttgcagtcagacaacttaagggaccgcatgtaaaaatcggattttcgcatgcgatcgttttagccgcatgcaaaaatcatgatttttgctgaccttttcgtgcatgcggctggcccaatcacatgcgaaaatcagtttgaacagtttgaaaaaacctattttgtaggagtgatcttccgatcctcacctgcaaacagacattctcttatgattgtaaccaacaaaagctaaataccagctgttataattgcatgatcctcatcgacggatcgaaaatgaatccgccggagcatgcatataaacccacagctcacgcggcgtcgtcgatcttagctgttcgtcgtccgttcgctagctgtgtgctaacgagggccccgacatcgtcgtgccggttggagtaggacacaaaggaggagcactggaacatatatagagcccaaggccaccgtccggagcagcgtgtacagccacagacacggctgtgtttgaaggtgggtgctgggaacccatatcctatgcatgaaaaacggaacggtccattgtgcatgattaattaagtattagctatttttttaaaaaaatagattaatatgattttttaaaacaacatttatatagaaacttttttttaaaaaacgcaccatttagccgtttgaaaagcgtgcgtacggaaaacgagaagggagtgttaacttgctcttgcaaacagtatcgtgaggggcccgatctatctctgtagcaccgcggcgagcaccgcgaacaccaggcaactgatcatcgtcttctccgcgtccgacgtctgggacgcgcaccaccaccagtgtcaatattcattctcgcaggaacgtgctgcacgcttgcgccggcccgcctcgtcatcagcgtctctcccgatctgctcgactccgatccggcccctatttcggtctctcctcgtgcctctggcacaacaacagatcgatggcaaaccgcataccacgatacccgtggtcgaacccttcggctcgatcgacgccgtgccacggtgtcaggttcacctcgatctgtcatctatgtcgctgggccttgcctgggccagatgaattaatgccgccggcgtcgacgccgaggcaatgctgctcaaggctgccgacggccgacctcatctctggacatattgtccacgctgacctcttaactccaagcatcacgtccttcaattccctacctctcgcctctcggtgatggtgatgctcgccgatcgagccttcggggccagacagcccctcaaggcggctatacctctggcatggctccacggctattcttttctcttaattccttcgtctcggattttcgatccgtgtgattgatttgaatagttagattcgtaatctgtgatttgtggtttgtcctcaactcctgattcctattcgttcaactggatcatgagtttcttttgcttgtatttgatgcagaatcggtcatgctgttcttccacgccgcgcaggaagcatgcggatgacgtggacggaccaaaaagttagagatggatgaagcgcgtggataagagaataccaaattcatacgtgtacaataaaagctagcggacgtattcaggcggcgcgtaaatttcggacgacgtacaaaaatttacgtgacgattggaaaattaataaattttactagaaaaaatacctgtgcgttgcaacaggaagactaatcggttaggttcatgatgctttgcatgtgtagtattttgacattatggatcatgatgttgacccacatggcaagctatcacatagcgcttgcttcacttgattgcaaaaatcactttgaactaataaatggcaacaaatcggagtcgttgtacgcacggaaaaaaaattaatgaaaccaatcgcatgtgtggataaaacggacgatggacgcaacgttttaccggaagccttacgtattttttaattaggctagaaaacatgttaacaccttcggactcccaaatcagtaaaatcgagtctaatttgaatggttgccaaatcaataggagttaagtctaatttgatagatacacgggatatgatggttttaatcttattgagcaaaaataattaagaaacatgaacataaataaagtttatatgaatttataatcaaatttctcgttgattccatttacctagaataagattaataagcaatcatatatttttttttgcattttttcagcaattttaagcaattaaaatggtactaatgctatttttgaaaatagaaaatacttaaaatcacacatagaaaaaaccgattttagcctggcccaaaaacttgcggcctgcctgcttctttgtggagtacgcgtgcacggttcatgaggcggcccatcagcacgacagcgtggcaatggcgccggcccgacacgggagacgccgaggccgtccgatctaatgggcgatcccgatttgattcgaacgtggacaaaaatttggcagcccaaccctaaccctaaaatcatttccccgattcccttcctctctctcgtgaaaagcaatggcggcggcggcgattcgggcggagcgacggtggcggcgacgattccggcggagccacaatgattccaacaagcggcaacagcgcgaagtcccttcctttctctcgtgaaaagcggcggtggcgacaattccggcgagcggcgatggcgcgtagcgtgaagccacggctgtctgagccactcggatatcgtgcagcgaactgatgccacccgagcccggtctgatgtcatgcgtggcgccgtcctggttctcctccgcacgcagccaaggccgcgatgacgagcctcgacctcacacgacccccaaaagacgggcgcaaggccggtccaaggcgatggctagggtgcgtgcacggcggtgctgatgccgtgctcgcatcacatgatggcagcaatttgccaaatcggtaagtcatcaatccgattcgcttgccgaggttctaattttggggacttttcgatttagggtttctgaaatcatgccagtgtggaatttttgtatgttgtatattgaagttctcatggtgtaacacgatgtggtttaaatttaatccgatctatgtaaaatcttgactgaaaccaatttgatgcggactcgggatgacgcgatagggactgatgaaatttttttttacgacggacgaaaattttaccggaatccttacgtattgtttaagtaggtatataggtataggtataggtataggtataggtataggtataggtataggtataggtataggtataggtataggtataggtataggtataggtatagatgtagatgtagatgtagatgtagatgtagatgtagatgtagatgtagatgtagatgtagatatagatatataaaactagcaaaagtgcccgtgcgttgcaccgggtgattacagagtgtgtatattgaccaaaagtgtccgtccgttgcaccgggaagcgtacaaatcagaaaaatatgcaattaattaaaatacaaattaaaatacagattcgctgaaatatttggtatttttaagtaggtatgtgtataattaaatgaatttacaagtaaagcaagtgtgagaaataaaatgatatggttaaatttaattttattaaattctccatgattagttacgctctttgaaattttattggaattttcagagcttaattgctaattttaataatacagacatcatttaacaattatgtaattagaaaaagaaagaaaatacttccttttaggtttgcttcaaaataaacacataattactataattgtaatgcttctgaaaaaaataaagtactaaaaataaacttctctttttctttggcccgagggacctaaaatagacttatttccgtcccttgccggtcggcccacggccttatgaaaaccctaaccctaaccctccccctccccccccacagccgagtcggccgcctcccccactcccgacgccgcttcccctcccctcccctctggcggcgcctttccccacggtgggcggcggcggcgcccttccccatgctagcagcagtggcggcggtggctctccttcccaactcgtcggcacggcgcagcgacggcggagacggcggcgacggccgtccttccccctctccctctccccgtcagcgtcgacggcggcgtcggcttcgtccgagggtggatccatcggcggtggcggccaccgcgggcggatctgacagcggcgctccctccggcggcggtggtggcgtcggcggccgccggtttcttttttgcaatttttttccatggctattgctaaccaaatcggattgagcacgtggacgaacgggacgaaaatagatgtgacgaaaggaataatacgaatatttatattagttataaattatagaaaaaatgccagtgcgttgcaatgggtaaactaaaattatattaaatataaaaatattagatgattaggatttagttttacatgatatgagctcttaaagaaaatctattcctaatgaaataaaaaaaagttcaacttaagggacctcaagtcaacttattccgtgcggagtagaacaaattcgggacaactttagggatattaaataaacttattctgtgagattacaagcggcccaatagtgtgggcggcctgggaaggcccgacgagggagaagctgagcggttctatctgatggacggtcctgattgatcgcgcccaatatataaaagttgaaagatcaaaaccctaaccctaaaaacattccccacccccctccctctctctcaatggcgccgcctctctcccttcgccgctcctccaccccctccccggcagcgcctctccccctccccggcggcgccgctccccctccccctccacggcggcgcctctccccctcaccggcggcgccgctccccctccccctcgccctccacggcggcgcctctaccccctcactctcgcctcgtgcgacggatccggcgtcggcggcgaccgtgggtggatccggccgtggtggtggcggccgaggacggatccggcggctacggctcccttcaacccctctcgcctccctcccgcggtggatctgacggcggtggtggcatcgacgccgaccgcatgtgggctcggcggctgctgctccccctcctcggtgtggcgacgcggctgggagcggtggtgggctcaggagccggtcgcggcggaaggcggcgatatcgacgacgaccacgacgacaacgacggacgacggcgataacggcggcgacgacgtcgaccacgaggagggcggctccggtaggcagctacggttagggtttggattttatttttgatttgggatgttgattttgtcgagattcatggttttgatttgggattgcaattaagtgattttgtaattcatatagtatgggaattggaggcaaaagggttgggaacaatcgggattttttttatccgactggaattttttggggggtgggggagggacgaaaaatcccctggcggacgatgtgacgaccggaaaaatacgaatatttatatagttatagatttgtcaaaaccacaagataatcacgaaatttatataacgtatatattttgtataggttaatgacatctatggtcaactatgcagagctataaaagattactatttgtacatcataccagtcttgaaaaattaaaactttcaaggccctagacatcaattaattaaaactttcaaggccctagacatcaatttgtgagtactaatataggggtatcttttaaaatattttgtatatactgaagtatatgataaaatatactattaggggtgaaaataaaaatatgctaggagtcagatgccacgtgctgacgtgcaggttcgccttttctccatccgcctctttctttttttctctctcgctatctctcgtcatctccatcctctctcgccatctctcctgtctcctcgaatcctaagccccggcggctgctgctccctccctagcggcggctgctgctcttcctccccggcgtggtggcggttgctcccctccccgtcctggtggcatctgctacgcccccctccccggctgccccctcccctccccgacgtggagccgaaggcggctcctgctgcctctccccggtgtgggagcgtggcggcagcggcggcggttgcttccctcccggcgtggtggcagcagctgccccccctccccgacattgtgttgacggtggctcctactctcccttcccggcatggtgacggcggctgtggcggctgcttccctcccccggcgtggtggtagcagctgcccgctgcctcctccttcccggctgcccctcatctccccgatgtggagccgaaggcggctcctgctgcctctccccggtgtgggagcgtggcggcagcggcggcggttgcttccctcccggcgtggtggcagcagctgccccccctccccgacatcgtgttgacggtggctcctactctcccttcccggcatggcgatggcggctgtggcggctgcttccctcccccggcgtggtggtagcagctgcccgctgccccctccttcccggctgcccctcatctccccgatgtggagccgatggcgcttctctcctccatcgcgacggtttgatttgggaatattttgaggattttgtgatttgggatgttgattcagtaaccaccgtgatgaggattaagtttcttgcgatcaaattcatgagctctagattgaatttggctttttcatactgtttttggtcgtctcgtttgattgatttgggatcgcttggggattatttttctatgttcgagtcggactggaaggacagacaaaccgaaaacatcacaaaaatcgcaaaaaaacgcgggaatcggacttgagcagtgggacgacgtacgaaaatatttggtagaaacatcttaaacttttataataggtagagatagagatagagataagtaggttagatagatatatccagttggtttattcgtttggtggtcgcaaataaatcgtaggcgagacttttccgtctcctagacggactcggtggccgtacgtgtcacctgttctgtccctgcaaagaaatactatggtataactagctagacgagacctttttggtctctactagacagataccgtaacagtgtctgtcttacctggattactggaacattgcagtatttatacctacatatatatatatgtgcacacaattcattatgaataatcataagtctctctccctttggctgcatgcatgccacgaagatgcagaagatgggtgtgaagaggaggaagagcagaagcaagcacacaaacacgacgtcgtactcctcccgagctgatggaagacatggttacggagatcctggtgcggctgcctgtcaagtccctcctgcggttcaagcccgcgtgcagagcctggcaagccatcatcgacgaccccgtgttcatccgagctcacctgcgccgctccgcctccaggtgggagcagagccacagcttcatcatcaaccctcacagcatggtcagagtcccttgggatcggtggccagtcccctccaatcgctaccgcttccatcagtggcagctgcaacgcggcaccaccaccacctctcccagaaacaataatgtggcgacgttcttgcatgccaaggacttatctgacgatcagcagttctacacaaccgagttcacgcaccgcgacggcctggtgttttctaccaccaccaccagcctccacgtcttcaacccagccaccagggatgccatcacgctgcctaccagttccaggtccaatctaatgggaggtggaagattcaactaccactgctcgggtctaggcctggatccacgcaccggcatgtacaaggtagtccaggctttcttccggttccagtcaatggaaccagctgaaacaaaaatggggatggaggtgttcaccattggaggaggaggtggtggtgccggttggagggagatcacgagtgatcctccatacccagccaagagattccagatcggcgtgtctgtctgcggctacatgttctggcgcttttccgagaggcatacgaagctcgagcgcggcatcctccatcttagcctggaggaagaggagttcggcatcaccggcctgccagatgagctggacactgataacagcttcttgctggacgagctactcggccgggatctgtgtgtgtcggcgtctaacaccagctgcacgatgctgaacatatggacgctgcctgtagcggacgagagcctgtgcacgctgtggcaatggcgttactgcatcgattacccctggagtctttgctctgtgatggctcttcctcctttcagcgatgaaatcatcttgttgcgaggtaataatatatgtcgctatgatctggcgacttctaagctcaagatactatgtagattggatcgcacgaggtaccagggggagggggcacggaagtcggaattgttcagtgccatgccgttcatcgaaagtctcgttcggatcacttattaatagccgatcatcgccctgttcagttggggctttagccttcagcagcaaagccagcacaaacaggattttgtgccttctcagctgtctgcagcgctgccgcagaataagcagctatttgcatgtttatctattttatatgtattttgaaccatgtgatatgtactaattaagttaaaagttttatgcttagctagtgaatatctgtgtggtactttcatcttaaccatataaatatggaaattcctagcttttaatttttttattttgcagccataaattaaccgatcagacgtggttagttgccaccgcaaatatatggctttttttatgcaccctgtctacgatatataatcgagtgccatcatagtgccagtataccgatttcccttatcatatgccaactagcatgctcaaagttaccctgttattgcaaatttgcaattgaaattcatgaaatttgctggcagaaagtggtcagttgggtgatcaaggctcagagctgcatcatggagtagagaccgattcttttttcattatatcggccacttctctcgtgttgctgcaacctgcaggtaatcgaatcgaaaggagaggaaacgcgcatgctgttgggcattcatttattttgattcatatcttatattatgggtcctgatattattattaggaaggtaaaatctaaactgtgaggtctctctatttagctttaacgggagacggcacagaaagcctacacatctatacgggagacaacagagaaagcctacacatcaatatagatgcatttctttttattcttcttataaaattttctccaaaattaattatccgatctacaatccaattacaccattgtgttcgttacaattaaatatttaaacaatatcttacatgattatattgcgacggaaaaatatttatgtttgtaaattacttttattatatatgtaagttacttttatcatatatataaattacttttagatttgactaagttacttcttatacattcataatgctctaaattgattatttgtattattgtttttagtcaattctataatttgtggtaatttttcgatagaccatattttcttccctgcaacgaatttacttctaatgttgtaacaatttacttccattttatgctaagttacttttatgatttatgtaaattacttttagactttactgaatttacttttataaatgcatttacttaaaaatcttctcttacactttgcttgtgaatttactctacatagtttattatttaaactcggacataatgtaattacttctaatgccatacagagttacttctactgtatagctaagttacttatgcaatttaaataaattacttttaaattaacaaaatgtttgaatatattcaacatagatcttgttttgtcacatattttatgtagagtacaatcatgcaaatatatcttaaaaacaatatgtgatttaaaagatataaggtattaaagagattaagaaaatatatacaattgcacgtttcaagttgaaagaagacactaggtggagtacaaaccagctactactagcgggacaattaactttgggccacttttaaaatgtgtcaattaattatttgccactcgttgtctatgacatgtggaccctcatgtgtctatgacatgtgggtcgcaagtcatttatcaccgtccgtaagagtggcaaataattaattaatccaccactagctgtgtagtcacgtccaatgaaaaaaaaagatatacattaaagttactttctttttgttataagttacttctataatatatgtaaattacttttaggttttattaagtttacttttatatgtctaagaagtaatttagtgaaatctaaaagtaatttagatatattataaaactaatttctaatttttcatccaaatataataatgtgagatcttgttataaagatttaattcttacgaactcaacggtgtaatctgattgtaatcggatgagtagtttaagtgaaaattttatttgaagtatatgttgatatggtctcttatagatagagtggtagctggtttagacaaaccagctaccactagctgtgtagtcacgtcctatgttaaggtgattttgattccatgaagtccatgtcaagcgagcgggggtgtgaagtcctttggaattttaggatttttggaacatggggataaaaaaaacataggtgttacacccaaattcggcacctagtattaaattaaggaaaattgccagagtttgaaagtctaccggttttcctctgagagggctggtctgaccgccgtatgtcggccggtcagaccgccgccaatgggccggtctgaccggcggtatgtggccagtctgaccggcaaaatccgagtcagactccgttttcgtcgggtctcgggtttccttgctcgggaaggcatgtttcgtgtttccatctgtttctagctcgagttggacgtggaggatgacctgtagagggcaagatcaacccctatataagggacaaggccggttcattgtaaaaaatcaatctaatcgttcttttacttttgcttctagttttagtttagtttgtccatctttttcgatttgcgccgtaaatcatccgccgctgctgcgagagtgcgacatctctttgtaggtttgtcctgaaaaccttccgttttgaccacgagacgggtagttatccatcgttctatctagatcggctccgctagccggtttagtttatcaaaacccatcttgatttagctttggctagattgaggtggttggcgactctaggatcactgcaaggcgtttaggtgctacgatcgtgcttgtcaacttctcacaaaaagttaccaacaatagaattcaaaattcatataatttgaggcaatcctaagaaactttaaatcggaattattttcataggaattcaatcctataaaattcacattactggactaaaagtaaatattcctctcgtctactttatctttttattagttttacactaaaaacttaacataatactaattgataatgacatagcatttggtttaatatacacttaaatgattaaaacatgttgatcaacgcttgttaaaaagtagctaacgtatatacgtacttaaaaaaaaagagtaaagtacacggccggttcctaaacttgtggggtggtgtcagtttagtccataaacttgaaaactgcacgtttaggtccgtaatcttgatttaatataccagggcgggtccaatcggggattgaccgcgtctaaccgccaacgtggcgtgccacatgagcatcaattttgcaatcggccccctccacatcgaagccgtcggaaattttacattttcccccttctgtgcactgtagcaggcgaaatcccactaaaatccccaaatcggcttgctccctcgcaatctcctagatcgacttgcttcccagggagagaggagagtagggcaaccgcgaccgcagcgacctcggcgagcacggcgatcatcggcgcagcggggcgagagggggcgcgccgtggggcttcgcgagggccggctcgtgacggccccaacctcggcaagcacggcgatggacctctccttccggggagaaggagaacgagcgcccgtgtatcgtgagtacaacccaacccacccaactcatctctctctgtttatctttgtgatgattccgttgagtttaagcattgaagattggttttttatgccatgtgacatgatattgatatgtgcgctaggtgaaaaatctagggtttagttgtttcttgattgggttgtgtgttttctgtggtcgtaggccctggttcaaagtatttctcttgagtttcaccatggtggatttttctatggtctgggagtgaatcggacttatattgatggaaaagtggattgatttgacaatgtggactctcgggagtggggtagggtattacaccttccagatttcatagctatgctaggttatgattcaggaccaagtttgaaggtgtactagttgctgccagggaagacactagctgatggtttgaggattgttgacagtgaggtggaaattaatgtaatgaattcagtgtgtaacaagattaagaactttgtcatatattttgatcacactgaccatgtatcaggccgaaaccatgaagacatccttttgacaccagctgctgagctccctgaagtttttagccctactagagatgatcatcaggaaccaaatttgtcaactaatgaacatactgctgaggtgaatcaaaaaccaaaaggaattgaagaagaggaagttgaagagtatgatttgtttgagggcagtgatgatagctcagctgattcaaactttgtggacagtgactatgagtgggaagatgatgatgatgacctgtttgaggataatgttgatggtggtgttgtagacattggtttaggaaagaaaagattcagtcataagaaggcaacagaaagtaagttgaagggtaagcaagttagtacagaagattacactgagcaagtttcatcagatgatgaaggattgcagttgccagacaattcagatgatgaaggtgatataaccctgaggtttaagtctttcaatccagaggacatcaacaatccagtgttcaaggttggaatggtattcccttctgttgaggtgattagaaaggcaatcacagaatatagtctgaagaacagagttgatatcaaattgcctaggaatgatagggaaaggataagggcacactgtgcagaagggtgcccttggaatttgtatgcatctatggatagcagagtgaagtcttttgttgtgaagacatatgtggcacagcacaagtgcaaaaaagagtgggttctgcaaaggtgtactgctaactggctggcagagaaatatgttgacactttcagggcagactcaaagatgactcttagtagcttttcaagaacagtgcagaaggattggaatttgaccccatcaagaagcaagcttgcaagagctagaaggctagcactgaaggaaatttatggtgatgaagttgggcaatataacttgctgttggactatggaaatgaacttaggaagtcaaaccctaggagctcattttatcttagtctagatgacagcaagtttagcagactgtatttctcactggattcatgcaaaagaggatttctcagtggctacagacctgtcatttgcttggatgcttgccacattaagactaagtttgggggtcaattgctgacagctgtaggtgttgatcccaatgattgcattttcccaattgcaatggctattgtggaggttgaatcttataacacatggagctggttcctatagacattgaaggatgaccttggtattgtgaatacttacccttggaccatcatgacagacaaacagaaggtatggtcattatatttgcttgtgaataattttgtttactctttacttcatagctatttcttaaaattcctatttattgctatttgtagggtctcataccagcagttcaacaagttttctctgaatctgagcatagattctgtgtaaggcatttatatcagaattttcaaatgcaattcaaaggtgagaacttgaaaaaccaactttgggcatgttctaggtctagttcagtgttagagtggaatgctaacatggaaatgacgaaggacctaaatgaggatgcctataactggttaggagagatgtcaccaaatacttgggttagagcattttttagtgaattcccaaagtgtgacatactactaaacaatagctgtgaagtgttcaacaagtatatcctagaggctagagagcttccaattctgtccatgctggagaagatcaaagggcagctgatgagtaggttttataacaagcagaaggaagcagagaaatgggaagggccattctgtcctaaaattggcaagaaattactgaagaatgcagagcatgctaatatttgttatgttttgcctgctgggaaggggatattccaagtccaagaaaggcagtcctcatatactgtagatgtcatcggcaagcactgtgattgcagaagatgggaccttactggtattccttgttgtcatgccatagcttgcatcagagaggagaggctgtctgaacaagactttctgccattctgctactcaattgaggctttcaagagtgtataagccaacaacatcatgccatgtagtgacagggccaactgggagaagatgaatgggccacaagttctgcctccagcgtatgagaagaaagttggcaaacccaagaaaacaagaaggaagcaccctacagaagtgcaaggcaagaatggcccaaaactcaccaagcatggtgtaatcatccattgcagttactgccatgagccaaatcacaacaaaaagggttgtccaatgaggaagaaagggatcaagcccaacatacagatcagaaagaagaaggatgtagctccaggaagtcaagagcccagtataactcaggtgaagattttttctttcacaaatgtgaagcaaaatatgctgattactaaccatattatcttgcaggaaatgatgggcacacaacctagaacaagtactggattgctaaatgaggttaatgacaatatgctcagtgtgatgatggcagaggtgcacttcttttcatctatgtatttcctacaactgcacatgtactgaattaactctacctataaatctaattttggtttgtttgcagtcttcacagcccagtcagataactcaacagcaaggtccattgccaaattctgttttcattcagcaaaaccaaccttccacaagacctgtttgctctgaccactgcaaccaaagaaggaagagcaaagattaccaaggcaaagaagaaggtaggaagtactacaaagaagaagaaggtagatctcactcagcaggaagaagatgttgcttcaaggaagaagaagaggacttcaccaggcaaccagtgatgcgaagaaggatgcacctggtggcaactatgcacattttgttcatattagataggtttgtatagcacttatccctagtattgtcatgtactgaagttgaacaatgcacatgtcatgccaaaaactatgcccttttggatagaacagataggccaacatgccaatacttctgctagacagttatggttcttttatgtaagctgtgatactaattatgtcagctgtggtactgattatgtgttgaggttgaaccctggtattatcatgcaatgaagtggccacttcttttcatatcaattatctctttgtttctgtcaacaatgtgcttgccataataaactgaaactcaagtgcttgctagacaagcagtcctcatttttgtaaccacatttgatgccctgaatcctgctgattactaaccatattttttttgcaattcagatataaaccagtgaaactaccaacatcaacatatatttgacacacatactgatttagacccactgaaatcaacagaaatatacagatttattcctattgatagcacaaacacaaaaaccacttggataacatttaattcacatcactgttctattagtcaataagcaacacattacatgagtctttcaattttcttcatcacttcatcataagaacaaccaaaatacaaactaaaacagcaacacctaaccaacctaggaccaacatgttcttcagtaccactactaattctcttccaatggacactgcagtaatcaatgtctgctttaattcatcaccatcttccctctaaactttggtttcatccaattgtcctgcattcttcaagcttgcagcaacttgtgcattcacatgtgcagcctcttctccagcaattaacccattcttcttcaaatatttcatgtatctttcctcccaaaaccaaaagttacacccagatccatctttctacaccattaagaacaaatgtcacctcaaactgaactcaacaccacaacacaccaaattcaatcaactattgctcacctcgtggtcagggcaagtgtagaaaatgcgatctggattactagctgtcttcgatgtgcgcttcacgacggttttattctcgcacgatgggcacaggatcaatggtaccttcttccggcgagtacaagcggaggccgggcttgaagaagccatgggggccgcgaccagtccttggctaccacccgtcatggcctccccgccgcacttggttgcctcctgccgtcgcctcgccaccgcagttgcttgcctcccgccgtcgcctcgccgccgcggagctcaccgctgccgagcgtccaaaccctagacgaattggggattttgggggattcggcgatgtacatcgggacgacacgttggcggtaaggcacgtaggggggaaaatgtaaaatttccaacggcttcgatgcggagggggccgattgcaaaatcgatgcccacgtggcacgccacgttggcagtcagacgcggtcaatccccgattggacccgccctggtacattaaaccaagattacggacctaaacgtgcagttttcaagtttatgaactaaactgacaccaccccacaagtttagggaccggccgtgtactttactctaaaaaataactcaaacaatttttacaaatatattatagataaatatattagtcaaatgagcgatgcaatcttgtacctagtgttttatggaacattttgctataaaacttaagattttctaaaataaattgtaaaacctgaggttttgtgttacggaagaatttactcaaaaagaatatatcctccttagagcatctccagcaggggtactaaacacacagcccctaaacaaaatttgagaggtgagacaaaaaattcaggtccaacaaagcccctactaaagcccctaaaataggaaggcctccaaattatcccctcaagcccccaggcctaggggccttctccctggcccctattccacgcgcgggagagaagtcccacaaccaccgagccgcgcgctcttttttttcgcgcgaaaacttctgctagcgccgctgctaaatcctctcctccgcatgcgcgccgcctggatcagcgccgtcctctccgactggccaactccttcctcgccgcactcctccccggcgaatcatctccctggccggcaacctcctccctggcggcctcctgccctactagccacctggctacccggcggcctcctccctggcgcccttcctctcggctgccagcctgcccgacgccctctaccccggcagaccacctccacgttctgcgcccttctccccagccagcaatagtcgaaggtattgcggtgatatggagacagacaatgacatgttggtgagcaattttcgttttcagtggtgaattataaatcttggttgcgtgttgttgtatatggcattgtgcccacaccatatttacatgtttgaaaattttgattttggatttgaattgtggcgtttgaaattgtaaatttaactatggttaaattatacgtgttagaaatatttatgtttaattattgtggtgttaaagatagtgtaaacaaggattgcatgcgaaaataagagagaaacatgagtaggggctaagaaataggggctattgctagagttggaggtattttttaagtccttgggagatgggggcagccctcatttaacttttaggggctttaaaataaggtctatcgctggatatgctcttagtttttagtttctcgcactccgcctccgtcgtccgccagaaacggatcctctgactttagatgcaaagtcatggtcttgcagttcacttcatcccagccaaccactgcatccaacggcacacatccatcttcctctcatttgcctgcatactgcgcggctcagtttggcctgcaggctgcagctctatttctgtagccatcgggccgcaatggctttgctgaattgatgtatgctgttgcctgctactacatgcatgaacgcaaaggtcaaggttgtaaccagaacaacagaacctgaggtgcagaagcataaaactgatataaaccatttggaataattcagaataagacctaaatttcaagtagcatcattcatgcactgcaaatgaacaattgagtttttttttttacagcactataaggcaaaggctattgtgactaaaacagtaggattggcaaaaaaaaacccaaaagtattgcactgaatacaagctccataagtaaaataattcttcagtgcaaaggtcatcagaaatttgaacctgcaaaaatttaccaactacccaactaggtaccacactctcgctggaaaaagaaacatgtgcaacacacaagttcagagaaaagacacatcaataataaaaagggtcttgactcttgaaatcaatctcgttaccaattagattacattgctttctaattggtacttagacatccataacaacactcaaaattcatcaccttatatcaccaatgacaaacaaatattatttctatttaccagtaggatccatggtgctctcgttgagcctcttcttccatttcttcaccaaagcaggaattgaccgatggtggaagatggatctacaattgattgcttcttgcttcccctggcacttcattgctttgttttcttttagaactgagaaaaaaggaatagatctagggtgttctatggacacaggtcgtctacagtactgcaggggatctcaattggtgttctatactctggcgccaaaactgagcgagggctgcctttttccctccattatccagaactgcacctctgtttttcccgcgccgaccgcgtgctgtgctattgggagtatacagtcaaataaggggaagatggatgtgtgccgttggatgtagtggttggctgggatgaagtgaacggcaagactgtgactttccatccaaagtcagaggatccgtttcctcgtccgcctctggcgcctccttacctagccatcgcatcgccccccttctcatcatccccatgcctcgcctcgcctgaacacccgcgcccgcggcaacggcctggcccgtctaccctacccccccccccctcctccatggcgctcctgctccgccgcctcatcccgcgccactacgccaaccgcgccgcctccgccgccctcgccctcgacccgccgccggctccggccatggtgagtgctcctatcatccctcccctcccgttctttccggtggccgcgcacgagcttagggtttaacgccgcgggtttcggtgtatgcggttgcgcgcgctcgcccgcgcgcgtggctgccggcggtgcggtgagcggcacctgttcgtcgctttgcctgcccgggtggtcgtcgtgtttaatcaggaaatatgtgcgcgcgctctggaaaatgggtagaggcagtgacagtgttccttgctgggccttttttttttttttggctgtgccttgcggcattgcggcatgtgatggagttcgttttctttttcttttttgagatagtgatggagttcgttggtggtggtagcttctgctgaaaatcagctgtggtttcacctgatacctgctccattttattcgagaaaaaaatattatatgacactgaaagatcataacttcagcaattttaccattggaaggcccattgcatttaaatgcaacctgaagatcctaaaagtttaggaatttaccattccatcaactcctgttgcacattttctgcattccttctccttttgtttcaaaacccgcatatctgcccttgggtaaacatattggtctaataaggctatccatctatttcttcttgggtcgaaaagaaaagaagctttttcctggaaaacgaagggaaaaaaaagttggtggttgtgcattcttgcaccgataggactctcaccactgggtgcatcttcatcgatgctctttgctgcccccatctccatgtttccacccttctcaaccctcagctaagcactcaggttcctgtgattatgcttgtcaaacgtgagaacttagaactttgtcaagtttgaattgtcaagaggatggggggggggggggggagcaactctagtctccagaggaaagggtgctagagcggttcccagagattgcttgagtgacagggtgcgggcagtagtgccgaatgagtgtgcgtgcggcaacggaataggggtagatgcttccagtgaaatggcttgtgagagccaggggaataattgtccattttggtggcagtaaggagtacaggaattgatggaatggaaattcctaaactttgccgtttttcaatagtatttaattacactgcaatcttccatggtaaactactgaagtttgatatttcgtgtctcaaaactaatttggaacatgacaaaggattctgcatgattctgctgtgttctactttgattatagtatgtcactcagaattttacttgttctctaagtattagctatgtgctaccttttcagcttggtgtatctcagagatgttcttacactttcatgccttattcacctttccgtccatgtgaaatgtgtggagtttcagtaactaataattcatcaaggcagttgtcttcaattcgttcccgtcttcccgtaaggctcaaaagtggttccttttttgctactgggctcatgagcaatcacaattttgtgactaataatattggtaattcacggtgctttctgactgtgtgcaataaaaatctgagttttctcatcagaaataagagtttatttggtaatccaaatatgagaagggaagaagggagtgatatgcacagtttgtttcatagatctgagaaaaagaaaagcacattaccttcttgtagcatcatcactgatgaggcttcaacatcaactagcaaccacagtaagagtgctattggtactgaaaatagttcaacaagcagaataaaggacgttagtgaagataagaaggtatctatcaagaaacagagcaaatctgctaaaactattgcggcagcaaagattgggacaactgatgtgagcgaagaagaaaacaagcgtgaaatttccaaatcagaaaagaatgccaatatttctagagataagaagacatcaaacaggttgaagaaattttcaaaagcaaagaaatctgctgctgctaaagctgaaatttgtacgaagagttctgttgatagttctgatagtgagcagaaaccacttgttcctctttaccctcccacagctaaatcagttattgttgttgaatcagttacaaaagcaaaagttattcaaaaataccttggcgacatgtatgaagtgttgcctagttatggccatgtgagagatttggctggaagatcgaaatctgttcgccctgatgatgacttcagtatggtgtgggaggtgcctgctgctgcctggacacatcttaagagaataagaacggcgttgagagggtatggttttctagttgatgtagtatggttaacattttcaaattttgtcgacatgaaatatatctttgcttacctcttttgaaaaataaggtgcttccaaaccattgtcaccagggttgaggtcaatgtcatgttccatgaccctggattgacatccttaattatagttgctgccaatcttgatacacagccagtatttgctgggaatcctgaagagaacttccccactccaatccacatctttagtgaccatatttccaccacccttatcccatgttcatatttgtcgacccagttggttgatcaggttgtcgtgaccatgctaaaaatgtctgctgatttctatgtagtcattttccatcttgcaaacatcacacatattaagggacataatcattagatgttggttttctgccttaccaattctaaagataaagaaacacacgatcccataattttcgtataaaatcaattgcatatatgcttcataagttattgtgaaacatcatacaccaatatcctcgttttatgcaagttagtaactaataaatgattgtttggttacttctcatcctcttttggatgtaatggtgtttaagccttttgaaagcatctgctgtaagttgggagatcctactagtttacccttgagcataaacttgatcatcacattctatgtcttggatactccttatctagaagttttaaatcacagttgtttatttacttatttttctttgaatttacaatcttatacttcatttggtcacaaatacttaatgtttcggacaaaatctggtgaaactttagaaaaattgactatcaatgactttaaaatacttagcttgaaacatacaatggtatgtatagatttatcttgaaaagtactttcataattatttaaacttactagattttatgaacttagtctaacataagattctgttcataatcacacatcaaagaccttgaaaatgaaggggtcaaacaccagggtaaaaataatttatggctatactggtaaaaataatttacaagtttaaattgcatattgaattgttattcgttggatacctcagactgccttttgctttatatctgtcttatggttatattatgtggtagtttgagctctttttttttagactggtaatttgaactggttcaggaataactaacagtataatgcgtactaatgtttgtttctgttataattgctttgtcttttttccttcctcagagcagaaaatttgattcttgcgtctgatcctgaccgtgaaggggaaacaattgcttggcatatcaaagaaatgcttgaacgacaagacgctttgggttgtaatgttactgttgccagagttgtctttcatgaaataacagaggatgctgttaaaaatgctttaatgtctccaagatatattgatatgaacctaattaatgcctatctagcacgacgttcccttgattatttgattgggtttggcatatcaccgctgttatggaggaagttgcctggttgccagtcagctggacgagaccaatttgcggcgttggctcttctgtgtgatcgagaggctgaaatagaacagtttaacccagaagagtattggactattgatactgacttcaaaacccaacattccggcccttcaaatggcctgaaccttcaagcccagataaagcatttgaattcaaaaaagttggatcaactttctatatggtctcaagaagaagcacaagatatagagaagaggatttattcgtctcaatttgaagtaataggaattaagagaagtaaaattcacaagaatcctcctatgccatatataacatctagccttcagcaggatgcagcaaacaaactacattttagtgctgggtataccatgaaggttgtcagttcaaattcagatgcgtatataatatttcctattatagtaatgcaatttagatgtagctatcttttgcctcacatggttttcaatgtgattgcagatagcccaaaagctttatgaggggatcaccctttcctcagaagacgcaactgggttaattacatacatccgaacagatggctttcatgtaggtaccatcctacctttcctttctgaccaaatcatcattatctttataactattgatagtgtaaaaatattgctttggtccatatccatagttacgggttaaaatggttcatccaaaataaacaaattaatttgctcccactatataaaagtgtctttacctttcttaaggtataaagcattattcaatctttatagaagttttatagactagggccttttaacatatagtgacagtgacactttctgccatgaaactaatttgtcagtgcttaaaaggttcttatttgatgcacagatcattttggtatgccatgtcaaaaaatacttttgttatgataacggtaatgccatatggaaagagtccgaacaacatgaccatgaatgggaggatcaaggtagcttaggagataagaggcagcatgtattctctagggatgttgttttatcttcatcgttggtgagatcaaagttgtgtacttctgatctcaagagggagaggtggcattgaagaggctctagggtgggggagatagagttgttttgagatggttgtatctatgggccattccgtgtgtagcttccctgtgacagctgtcttcaaaagtaaattaacttctgttgggagggaaattccaaattcctaacaaatggataaatggcatgcccaagtttttttttaaaagtaacactgccagagtgccaggcaatgtccagcagtttaaattttataaatataaattaaaagagcttcacagatcttgtaactattaacaactatgtttctaagaggttcattcatcctacaaatatgaaggagaatatctttttcaaaagatgattatctacccgatctccagatatgtctacttatctgcttcctcaagacaaaattaactgttgagtgacctctccaagttccaataactcgtatgcttgttcagataatggcaaatgatattcatcttgtggttgcctggccaacatggcctcaactaaatctacggaaaatttggcaaaagaatgcagtcttgaaaattgattactaagcactgcgtctcaccaaagatcatcccagaaaaggattgtatttcccaactgaactgaacaagcagtgcctctgaatatgttggaacctttgttattcacaacatggggcaccttacttttatagtaacttatccaaatcaaattaacccatgacaagttgctatgattgtagaatttatccagattatttagtagaagtgcttcattttgtacccttaaatcaatactaccccaagccccctttagcctttggcatgcccaatttggacactatgtctaacatgaatgcgtaccccagcctgtatatcagtgctacacaggttagaataatcgctgcctgcaataacaagattgtggtgaattttatattttttccagtgatacatgcataaaaaaagctatatgcattcattggcaagaagtcgaatttctgcatgtttgaggaaaaaaagtctaggtttttattatattttgcatcattattgcaatgagtagataaattgtttttatttttcctttttttttttggctcaagtagaggacctagtttgatccttcctatgagcaaagcatgcaaacagggggatatcagtttacctaatgaaaaaacctaccctgtctgcaacatctaatttccagtctggattgagagctctaatgagttctaacctatctttggaacaaactgactgatcctagtcccagtcctaacatttaaattggcggtactcatcatcatttcgattcatgtatgtataagtaggtatagtagtaattttaactagaaatttcaaattatccgatttggtgattcatcaatatatgacatgcagtactcactatccctttacgtcagaatttcctttcatctcaatatatgatatgcatgatactgtacttgttttaatagcctcaaattgtcatcttacttgtatggtcggtgttttcccttgaagatttctgatgtagctgcagaagatattctttcattagtaaagcaaaggtacgctctactggagcatctagtcaagtggttttttgttggttgatatctactgtttcacttgtaatttataagttattgtagtgcccaataatctgaattcctagtttctcaattcatgattggaagtgtgcacatttctcatggttattcacgattattttaatagcaataagttttctttttttttttttgctgagaacattgtttttcaggatgtatatgatggggcatatttatgaatcactttatttaaattcgattcaaatcaattaatttaatctatttatttgttgtgaagatacatttgattacatggtcggagcagttcctgttctttggttgttgatttttgttgtttcctaattgataattcataccatcagaagaaaataccattgcttcttttgttccagttatttaccatcaaaatgtttcactctttagagaaaaaagaacaatctgtcaccatctactagctccttgtgctgtttggatgtgcggagggaatgatgtcctgtgaaatgttaaaaaatacctgctcaaaaggaacaattcttgaactagatatttcatttcatttcatgcggatgtatcaagttttgtacgggtaaaatcagatccaagagataataacgtattccaatggctattgtcatgaagacatcatgtacccaaacatatgtaagagattaatttcaaccatattaagatgtcagtagcagcagaaacatccacattctatttgaagttttcatgctgttgatgcttcagccatgctcaaccaagtgtgaagcacctccttccgagggggatatgatgagtggaaaggccagagatggataagcctagataaattaaagaatgaaggatggaattagctgacatgcatgggctagggaggaatcaatgaaccacaggaatacttaggcatggctggcatgcaccatgtggaaagtggaatcaatgggaggtattatgcaatggaaaattgacacaagtgtgacagtgctatttatctcatttttgtgtcctgtttttagatgaaaacttttttgtgtccttctggtggtacataaccaaacaaaagatctttactggtatttttcaaacttaacatcattggatggtatagaattttttttccttattactatcatggcttggtcaatcctgaatgaggtagtctcaaataatcagtatcatcagttattgacagtttacctttttcactttatgtgttccagcatgtgctgcatgtcatttgcaacctgcatgttttaacaagcattttttttaggtatggtgaggaatatgcttcagagggcattagaaaatacttcaagaaggtgaaaaacgctcaagaatcgcatgaagccataaggccaaccagcataaggaggttaccgtgtaatgaaatctacctgttgccctatgtaatttattgtgttctatctattttagatgatgcatttcatctagcaactttatttggtttcagacttaatttaaaatatacctaattgccttgtggagatagcaatgtaaatatagaattatcgtatgtacatgaccaaatttgttgcgtaccaaacatgactataaaacagagttgtggagatctgttatgtattgatcaacttctagttttccagatttcatagatgggcaatattttgtcacttcctacctactgaaagctttgaatacaacattttaattatgttagtatccaaaaaattgtttgtattatgccgtacttactcatttgtccttcttgctttttcttttttctaaaacaatgttcagttgctcacaatattttttatgcacttctagcgaagcatcaaatgcctgctacactactgtggcaacctgttgcaaacctagaaatataattaaagcttataaatttgtaaacatcacacttaaaacattgacgaacaactgttttgcttggtatatgtaatggttatctgttaaaatggtatattgtatagtatagttggcagcagtgttcgagtaacttgttttgtggttgaaatgtgagccccagcaagatgatgaattccatgaaagtttgtgattttcatttgaaaattcgaaacaaatcgagcgattcgggggagctccaaattttgtgaccatactgaaagcaccagaactaacaattaaaacatgtataataccaaggaaaatattatacgtgttttaattgttatctgttattccctccgccccaaaataaatcaatgtttgtacacgaatctggacatatgctatgtccatattggtgtacaaagtttgacttattttgggacggatggagtaaaatatatactgtataatttagttcacagtaaaacttttctttgaagtatccactctctgtctcactgttcaacacctagcatatccctgcttaattcacaagcagcctcgagtaacattttttctaaatattgcttttgaccatctttgcatcattttaggagaaatggtttgccatttgctgtgaatatattttcacctgaggtcggcatctgctttaggattaaagtacctgaaggatgaattttgttaaaattttgaagtttgggttgctaaataataaactttggttttgcttaatttctgcagcctatttaggtcttggtataagtttctgtcttttgatatatagttctgtcgtaatataccttgcagcatctttggtcagtacacttgatgatgattctttgaaactatatgccctaatatggaaaagaactatggcttgccaaatggaagcttctagagctgagatggttagctattcttttgcctctttttttgtactgttatttttcacagctgttcctatacacttgtcacttttcttattgtggagtgtttcttaatatgaaaaccatggtttagattaattggactaaatatgttctagcctctaatgacaccccaacaacaagaacacactgaagtaaactggatggtactgtctatagttagtaggactgctctatgaaattccacctaagaaacagctttttttagataacgggcagcgcccggcctctgcattatcaggtgcacacggccatagagttgtcaaaaaacagctgaacagagaagaaacaagcttctatgactacatagagttgtcaaaaaagtgtaagtatttgtgagtgtaaggattattcgtttggatgtctgttcaaaatgttccacaaagacatgttagttaataaaaaaaaggttggtagtgaatatggatttgtaagaaggtgcttctaagttgtaaccaagcaaaataattcgttctgtagacaaacgtttcatttctggattatgacagctttgaataattgtatctgaacgtacccatatttcttctggataataatccttctatttaacagttgctaatttggttttatgaattgctgacacaaataacaccgaagaggccacatggcaatgcttgttattgctcttgggctaaggcttagttcgaataggcatacatagtggtcccttggtattcaaaatgaagcgagtcattagcgcatgattaattgagaattaactattataaacttgaaaaatggatttatttgatttttttaataaaaaaccacaccgtttagcagtttgggaagtagctcatccaaaatgtacttgagaatgcagcctaaatatatttaatagtagcatgctggtgttgtaacagacaatatgttggcctccattttctctaatatgtattatgccaaaatctctgaatttccatggtaaaaaaaaatctcttcttttttttgtgcactatttttttttaatagctaaaaaaatcaatcaaatttcatgcttagagtttatcttttcgtaattgcactgtagattcaagttgatattggtaattctaaaggagacatgatttttcattcgtctgcatcaaatcttgacttcaagggataccaagctgtatatgatgtaagttgtacattttatgtatctatgcttcttgcatcctctatacattcagaacatcctgtatagttcacttttctttgcctaagtttttctatatcctgcctcaaccttttaggaaaatctgtttaatactttaatgtcttctaaatgcgaccgtccactttcttctgtgcttctgttaagaaaatgtgttacctttggagattggatgatcaaaattgaggactatattaatctgtgcctaacatttactttagcttgcttaactcagtaatgggaaaatatgttgcccttttaggacacggaagcaagtccttccagtaacaattctgaggatgatgctgttcatcaggataactttgaggccttgtccaaattaaaggtcagcagctgttaaattacctcaacggtccacttcctatgacttttttgaagctaatgcttattgctgcctgtcattgaactatatcagcatgttattgacttattgttgcatttctttttctcaggtgaaggacttgatgtctccagttaacgttcatcttgcacagaactttactaaacctccatcacgttattccgagagtgcattggttagtactaatacctatatgttactcttttatttgttcattctgagccatgcctgcgatagaaaaatgttccttttattgggctttctctgtaatttaagaatgtaaggtttcttccttggtacctgcagattaaaagactagaagaacttggaatcggagggccatccacatactcttctataatgaaagtattgcaggtgccatattcctatgacccactctcttagatcatgatatgcccaaaatataacccattgccttttttcattttcatatatatgctgatttttgggttggatgttatgaacaaactatgtagcttacagcatgtttgtgctgggttgctttgcttatgttcctgtggtgctgcatatgccatgtggtgcaacacaggtcatatggtaactgttggacttcaatttacttgcatcaccttggacctttcgaatccaatggaagttgagttgtatgtggtttgcaacgtggagcactggggtcagcacatacgtggtcagcttggcattaagctgtgatctggctttagagttctttgtaacataatctaaatctggaaaccaggagatactgtatctatgatgtttgcctgccattggatgcaagtccatctacaaatatatgacataaataaggaaaggttcataaaacatatcagccgcaagaccccaacttggataggctgagattgattaggatcatccctgggcaaagtagtacaacatacaatttctttttcaaatgtacatccagagatgtttgtttttgttggggtcaaccacaatgttacatggacaaaacaaacagttgcaaaatagttggaacttgcatcatcattaaattaacaatgactcaagccacatggataacagtgtttacctcttgctattcaggatcgtaaccatgtgacagtaaaaggtcaagttgtgcaccccgaattccgtggtcggatggtaggttgtttgctccttatgtcatttccttttagaaaggtcttatttggcaataacatctacaatcctgatcacacattgaatttctgttatattgatttaaataaaagatgatacctctagctatatgtattacttgatcatataatccaattgtgccaaagcataaaccttgtaaggaaaattacaggttaactatagtccctaaagtcttcaaggcacctaaactattttttatatgtgtatatacgattctttcacttctcgcatcaatgttgcttatggtaactttaattaattaagttgttttatttcttctatttttgacatatgttaactgccatctcttccttaggtctcagcatttcttacacatcacttctcagaagttgcagatctcagctttactgctaacttggagactgaggtagtgaacaattctcagtttgtaggttatatctacatcccctttctttcttattcttgagatcagaaaccagcataagctggctagttactgccacagatttggtcaatgtgaatcccagtaattttgcagtttgatatcagtatgaaagtttagtcacacttgtttcagaagagaatcttaaaccccatgtgcatagaatagtttttaaaaaatgtttgtttccttgtccgtaattgttcttgcatttgagacacattggtggtattttatagaaatgtgaaaatgactaaatacagaagttttacttgagactggagcttgtttggtaagtttttgcctgaacttgagactggagcagggctgtcctggaaaagcgctttacaccaaataactggacaatacatttattgtgtaaacccctctactttgtgatgttgttcatatgctaatgtgcaccccttgtcaattctttttaacaaacaatgttgttactaccaggatgtcattttctgatatgcccatttctcttgcactttctgtttgagcaacatcaagcagtgtatctgacttgtgttaaaaatagaattgttggcatattgataaaaatacacaaagaaagaaaaggttgatgaatatatgaacatcttgaatgagatatgctagtatatatgatgtcaatgaaagtattcttgaaaatattcttatcactctacgtccactgacatgggctggtatatgtgaaaccataaaaacttggagatagatctaaaaaatctgattaaattttgaaatttttctccaagtttttcccatcatgataacttaaccagcaattgttatattcttatgaacagctagcccgcttcactagtcctaatatgataattctgaagttggtataaacatactaatatccctttcctactgctttattagcttgataacgtctctgctggatcaactgaatggaaaggccttctgaaagatttttgggaacgattcaataaatattgtggcaatgctagtcgccttcaagtcaggaaggtactacctttttcacgtctcttctggaagatttattcacccttgcagctaaaaagaaaaatactccctttcctgatttttcataaggtgcaattgcctttaaagattcaaactttgtaatttttaactcatgactatatatgtttgttgacacaaaagttgtattggatttatattcaaattattttcatatgatcttggtcttctactcttctaatttaacttttagaaatttacctaatggagggagaataattcctagaactgtatgactactgtctctagttatcagatgatgcacagtcaagtttatttctctcacatgatcacatcaacttttgtcaagacatagcaactgggttaagggtgtgttctttaccacctctttccaagtacttccttgttttccacgcgcatgcttcccaaactgaacggtgtgtgttttgtaaaaaaaaaattatagaaaagttgctttaaaaatcatattaatctatttttcaagtttaatttagctaatgcttaatttatcatgtgctaatggatcgctccgttttgcatccggggagaagttcccaacctccacctctgaacgcagctcaaaagactggtttctgtgagtaggttctaaaaattttgatggttgctaggatgcttgtaacttgcaaaccccacatttcttctgaggaataagatatgagaaatgttgggctatgatcttgttcgttctccctacagatgcttccacttatgaactcaggctactagcaatggaagaaaagaactgctagtaaatacaattgtggctgagcccatgttcttgtccaaaaagtgcccgatttgctttattttcccttttctttccagtgccccatatattacgggtagagggatatggatgaaaaacgaaacaacatggttaactcattgagatttatattactgggctttgggtttctgcctgatttccacccacctgctcagatttgtgcatctttataccagtcattactcattagcaaattgtactgtttactatagatctgtaatccctttagcattgaaaacggtattttaactaactatccactttgttgcaggtagagagaatgcttgaagaaaaatttggttccatcctctttcctgaccttgacaatgatagtaggatatgccctaggtaattcatctcattacgtctaagaagttgttttctactttgtagaaggttcacatttattttgccataaaatatgtatggtgctatattcctacagattaatttggtatcgctaacctgtcatgctatccttatgattgcaatatctgcagttgttctgaaggaactctgagattgaaagtaagtaagcatggtgaaggatattttataggttgtgatcgacatccgaaatgcaagtatgaccatatgatcctctcttagaaattatcaattcgttgagtttaatccttgctattatccatgttacttctgtttataaactatgatttaagcatttattgtttataattgagagcaccatgcgtaccaaacttgaaggtacattgctcgcacattgtcggttgaagttgatgaaactgaggcatctgatgaaattcaaagcacttttacacctaggttacttggggtgctacctgattctgatgagaaggtatattctagtcttatggttatcctgctttgttatttttcttgtacagaatgtttatgatattttgttgcttgttttacaggtatttctgaaacaaggtccttacggtcactatatccaggttggagaggatataaaaggagtgtctcggaaaagagctcctctttctgaagtaatttccatattaatatgtttcttaaatgcagagcaagcttgtgtttggcaatttctgatctacctttttcaagaactcaacctcagctatgattcaccctaatttcaggtgaaagatattgactcaatcactttagaagatgcaatcgagctattgcagtatcccaaaatcctggtatgcgcaacattttagctgctaattaagttcacgttgatgagctgccccatgatgatattgttgtctgattgatgtctaacagggaaaacaccctgatgatgatcttcctgtacttgtaacacattctaaatctggatttagaatcagacacaggagaactcttgctccattgccgaaggtacgtgttctaatattgtactatctgttgaatgttggtaccacacacaccattatgatactacgcgaatacaaacgcgcaatgtttagttcttttgtgctggcgctattgttttctgctatactacaattgaacaaaacttttaactgctgagatgcatatatttcttcaaaattgtttgtgacagagcgcagacccaaaggagattacgctcgagcgtgcattgaagcttttgacaggtaaaaacgtgataaggtttggtcgccctaagggaatcaagaacccagaaccccttgaataccattcgtaaacatctaatattgtaaaagagatgtttttagtctaacaagatcgcttatcgaacgcgaaatttacggtgattcctgaccggcattgtttgaagccatggattccgctttcttcctttttttgcctaatcctgagtcggcttttgtatgctttaggggtgtacggtgagtttgataatgtggagagatcgtcactcacaccgtcacacgtacgttcacggtgtgtagcagcgtacaccctccgtaccaacaaaaaaaaaatccttttgtccatatcaatctccaaaagttctttctcgaagcggagggtgtaggtgagtgtgatcgtacctgtgagtgaatggatgcagttcgtaaaagtactactcactgaaatgtgggttccacagcccttcagatccacatgtcagtgaatacatgtaatactgcaggggatcttaattggtgagtgaatatgactgtggttgacaatgaagatttgggctcccatcacatttgtttttcctttcgtacactactgccgaaacaaaggcgaagcatttgccctcttttcaaaaaaaaaaaaattctgcagttgtatacagcacaaaagtacttgccagatcatacacccataggttttcatttctctcttgcgtgtgaagtggtctcaagctgccaacgtagtcagtcacaaaacatgatgcattgagcatagattttgtttgtccttgtggagttggggtgaaacattgaaatatgtttgtttgggtttaaggtttagatttgacacggtgcttgcatttataactaattattctttcaatgctagacgatgtacatgttgataatgaggcgtttgtgatgattttgtcaatctcaaaatgcgttggtctgatctctatgcttataggggttatgcttgtaggggtacgatgtacgtttatagggtgagtgtagatgtgtttgtgagcacttatgtttgtaatgtgtttaaaaaaagcaaaatatgaaaatatgagcaattgttttgtggtttagaatcattatcttactcctttcattctaaaataagttaatttctatagtctaaagcttgtccaaaataagttaattattaatctcttatttacccacccatcatgttttcttatgaataaagggcactttggtcttttaccctcaacaccagtttcattgggttctaggaatccatttagggctcattcggttttgttgattttcaaaacatagaaatagaaaaagaaagtaaaaataatatgggaataaatgtgcaaatcggagaattgtaaaacacatgaaactttcgtatggttgctcaacaagcccgccaaaaggattgaaaacgttagattggactggtttttttttcactgtattttccccctaaaattgaaataataggatttttttttctttggtaaattccttttgagacgaatggcaatttaatttccatttcaaatattatatttaccgtattttcctttataattcctttaaaacaaatgagtcctttatctggtaaacttattgatgtgagcgattgcttgttgtcactaatgggatttgacattcaatgtgaaaggtaaaaggtagcaatgttatcatgtactacctccgttacttcctttgtcccaaatataagaatctaggactgaggactggatggaacgtttcataatagatatacttcctctctagataagttataatagaaattgtctcatccagttttagtttcttatatattggtacggagatagtacaatatacccaatgagatacctatgtgtagtttacagggatcctgggacctcatcaggtagattatctaattctaactaatatatgtcatgataattagtataatcgatcaataattagttaattagtatgtgtgggaccccgataaattttgttcgggttcgccactgaatataccccctgtcttatctcttctttatataaagttaatgtccactaaatacctaatgcttaacatgcaaacatagtatttttagcattcctaaaacctacatgcaagcatatcacatcaatccattaaacacacaaagctcaatatgcaagcatatactttattctaaaactaaacatacacatactaaatcattattctcaaatcattttcataatattcaatccaaatcattttattatttctccattatctaacatatatcccgcaacaaagcgtggggcattatttagtaatatagaaacctataaccggatgagaaatttcacaatacgaggaatttggacaagaaattgtccagatttattgtaatatgaaatgtccaatctatagattactatattatgagacggatggagtaatgtttataactaaaactttttatattttagaatagagggggtgcggtttttatagatatgtgctatacttttgaaagtaatgtctaatttttagaaaaaaaataaaatattttagttagcatgtatggagtatgtaccgtaaacttacatgcacatgatataatcaccctacacagaatcatttttctaagcattcatctaagcacccctacgtacacagggatgctaattagcgcatacgcgctagattagcaagttgcgcgtactcgcatgcatgtcccaccctgcaatattataatatgcttgcatgcatgcattggtcccacacctgcacatgcatcagcatcacgcatgcatcagcgtcacacacgcatgcatttgtttatctagttaacatctcaaattagtatctttttttccttttttttttcttatcttttaactttttttccttttttcgtctctgccgcgattttttcttttttttcttttcttttttgttgactaccgcatacgtgttggagtaggagttaagatttaaaactttcaactcaagattttttaaattttcaactccgatttaaaaatttttaagtcaagatttaaaaactttcaactcggatttgaaaactttcaattcaaacttgaaaacgttcaactcggatttgaaaactttcaattcagacttgaaaactttcaactgaagatttgaaactttcaactcaaatttgaaaaaattcacctaaaaattcaagtcaagattttgaaaacttaactaatgtttgaaaacttttaactcaaatttaaaaacattcacctaaaaatttaaaatattagatttaaatttgaaaacttctatctcaaaattcaaaacattcaaaaatgcacatgctaacaattaaaaaaaatcgaaaagaaaacagagaaaaaaaaaggaaatgtatagatggagccaaaataggaaattagaaaaaaaaaagaaacgcgcaaaatagaagattagaaaaaaaaaaaaaggaaacgcgggatgctggcgcgcgcgccgcacaagcaggccccctacgtacatgcccgtgagcacttccatcgaactgctgttgttttcggcttttcaaggtcatcggcactgtgtgttgagttgtgctgaagttgacggttttgagtttgggcttcgcgttcatttgtctcctcggaataagttcactttaaatctaatcaaaccacaaaaccgaatatcttaaccccctaacccttaaaaccggtgcaattttactccctcgacggttttgaaaggtggtttcgctgacgtggtgtctacgtggcggttttgacttggttttcttttcacgtggcgttgacatggcgcttacgtggcgttagaaataaaaaatatgtgtgggacccatttgtcatgcaccaaaagtatgggtgggacccacataaatcatcctctcctcatcctcccccctctctcgttctcttccgttcggcgagcggcggccatgggacgggggctggcggcgggcgggcgagggccggagacgacgaagccgtgagggcggggagggcggttgcttttgctcgctctgttgtggctagctcgtgagcggaggcggcggattccagcggacaagggcagagcaggaggcgaagaacggcggcgggcaggagcaggccaacgtcagcaagggagttgggcgacgagcggaggaggaggtgggcggcgtggcccaccgttcgccgctgtctccgcttgcctgctgttgccaccgcccttccgttgctgatccgcctccgccgctccctcgccaccgcgctctgcacggcctggttgtggcggtggtgatggcgcccgtcatcgccgcctcccgccgcgccgcccttcttcgcctccaccgctccggctccctgcacaaaaacggcgccgtccttgagctcgaggaagacgaaggagcccttcccctgctcccgctcggtcttgacctttctcgctctccttccctcttcaagcggtgtggcaacgaggagcggccgcggagcatgattccggcggcggcggcgggcgggtgcctttctctgagccgtggcgtagagaccggagaaattatatatcagttcttgattcatctcaccagtgattgtcatgcaggcgtcaccgctgtatatctcggagatggccaagatccgttgtacatctcgctgatcatcaaatataatcaagcttagttactaactaatgacagattggagttatggcaggctgcggcggcacgagccagaaaagccgtcgtcatcgtcgttgttccacttccaccctgtgaagcgtggaggcagccgatgcaccaaccctgacctgccatcacatctcacccaactgccgccttgcagcgtataccgacaccgacaacgcgctcgctggagatctttcggcgaaacagaaacgacgaccgtgccggccgtcatggcatgcagtagccgctgtcggcgtggacggacacccaaagtagctcgccgtgataatcgatgccagtcgcttcctcctgcgcctccgcacgcgttccacctcttcctccacccggtccacagtgtcctccacgcccgcctcaccccgtgcgccgccacggcgctctacctcgaggccgaccggcctccaccgcaccatcgccatctccgccgccagaatcatgctccgcgaccgctcgtcgtcgcctcaccgcttgaacaaggaaggagagcgagagaaaaggccgaggtcgtcgtcgcgctgctccagcgcccgcccagctcccgcctgccgccgagtgcgctggcaacggctccgcggggaggggtgggggaggccgacaacaacccgcgggccgtccgtggcagcggccaaggcggtggccaacggcgagtcggcgcagactccatcgtccgtgcctccgtgaggggagagaagggaggaggaagacggggaggagaggattatgtgggctccacataacagtgggtcccacttttttttttgtgaatgacaaatgggtcccacacatattttttatttctagtgccatgtaagcgccacgtcaacgccacgtggaaagaagactgagtcaagaccgccacgtaggcgccacatcagcgaaaccaccctccaaaactgccgagggagtcaaattacaccggttttgagagttaggaggtcgagatatccggttttatggtttagggtgacatattagatttcgatcacttttaagagtcacaaagtgaacttattcctttgtcctcccttcatttcattcatgggccacagctttggttctatggaattcctccgctgggctgtaactacagatggcaactcctacttactataaattggtccctctgtactgttgtgacatgtgagcagtaaactaatttacggccgatttttgtcttggcaactcatgagcgaatttggacttgaattttgaaagttcagtaggatgatggataccacgatacgtatcattttcagtttcttataactaactatttacacccaggttagaggatatatggacagcacctcaataataagatgggttcatccaagatgagagaacgctttatcgtaggagccacatcataaattcatatgggctgaatctcaagttgatatccagcagagcataaaggctgaagagatcctctatgcaaagggtgccatcactactgaaatcctcactgattattggtccaaacatacatgcacctttttaaagaagaacaaaatgattgccttcctagaagtaagtgatttttttttcactcgaagtaagaatgggagtgtactctgccctcgaaagaaaacagttggagactagctatcgaaactggtacattgtaaaatgcacatagagatatatagctcgtcgtaggtgatgctaagcatcggttcgtttatgctccttatatggtcacggttgaactcgttaactttaacaagctaaaaagtttagcttggctggcttggcttgtgagctagctcattagactccttaagaagctttagctcacttatatcacctttgtaatctttaattcatcagattatcgtatgtcactactacaaaaatagtgatttttctgtacgagagcccataatttttgcaaacggaccataactagtagtgtctgcaaaaatcaagacccatttttccatacggctccttaagtggcccgtatggaaaaatcgattttcccatacgggtcttttaagacggccgtatgaaaaaatgagctcatttttgtatgcggctcacttaagtgcccacatggaaaaatatgcggctcacttaagcgcccgcatgcgaaaataaaatttgaaactagtgtatctcacacatacaaactccaaattggatgattctttttccaaaatgtttctaaaatcatgctctatcatgttattgtgttcttactgatattattttggtcattttttcttgtgactttgttttatcaattaaaaatttgaatttcaaatctttgaataatattttaaagcagtaaatgatttcaattgaaaaagacatcaacaacaaagttgtataactcatcaagatttataacttctattttgatcatttcttcatccgacaaagcgatagtaacattttcataaaatttacatatctctctaatagtttataaaactatataagagatatatacattttgtgaacaatgttacaaatcattttgtcggatgaagaaatgacccaaataaaagttatagattttgataattataccactttgttattgatgagtttttcagttgaattcatttagtgctagtaaatattgtttgaaattgtcataatttgaaattcaaattcaaactgttcaaacaaagtcatatagaaaaatgaccaaaacaaaagttgtagatcttgataagtcataaaactttattgttgacaacttttccatttgaaatcatttactaccccgaaaaattatttgaatttcttatattttaaaattcaagttttatatagttcaataaaactcggatggagaaatgaccaaaataaaattggtaagatcttaatgagttctacaactttgttttttacaactttttcacacgagttcatttatctagataaaattttattcgaagtttgatattttaaaattatttttttcccaccacctcctttcaaatttttttcatctcctcttctctctctcctcctatctggatatttaaactccccatccttatccttttctcagcctctccttttcctaactctttcctcctctcctctctctctctctctcaacgcaccgagcatgcaggagcggcgttgcaccggcggcggcggcctcagcaacggcggcggcctcccttccccgatctcccatccggcgcggcagcgcgcggcaggctttgcaacggcggcggcggccttccccgacctccatgcacggcactcccttcctcgacggcagcgggcatggcgagacgacgacggcagcggcgggcggcgggtctggacggcgggcgcgctgcgggctcggcaccggcggcggcggcctcccttcctcgacggcgcggcgcataccccctcctcaacgccgcggcagcgggggtggctcgaccgcctcgggcggcgctgcccggcgccgattcggtgccgccgccgacggatccggcgacggcgtgcggcggcgggctagggttaggggggttttttggattttattttttttgtttgccgaatttatttttgcatgcgaccggtataagcgaccgcatgcgaaaataggatcttcacatgccgttgcgccggccacatgtaagaagagcgatttttgcataccttctcccccatgcggttggggcaaagatcctcttcgtccgcatgtaaagaaccgaccaaaaatattaaaagtaattaaaggactcaaatataaaaaaaatgaaagtaattaaaggacttactacgaggtaataagcattgaataaagaaaaatgttgacattctatactagcgagtaagtaagagaatcatcaaaagatgcctaaaaatctatccctaaaattatgtttttaagactagcgagtaagtaagagcatcaccaaaagatgcctaaaaatctacccctaaaattatgtttttaagactcctaattagactttgaggtgtgtagattcctctctccaagaaagatctaaaaactaattcccaacaataaaaacaggtccatccaacagaaaaaggaacatataccgcttctccccaccctttagaactgtgcagcccagcccattaacagataggcccacttatatataagcaccccccttatattttcgtttttaatttgtgtaaaatagttaacttgaaagtggtacagttggagggacagggctttgtaaattggttctattgttgctcaactaataaggtggtactaaccaagcgcacacaacacttgtaagccacatatataggctaagtaaatgtcaaagaacatgctccctctgtaggctcttataccgttcgtaatagcccatcctccatgagacacatgttggctctgattccatttataaaatagctcatgtaggcgaagcccacatgcatcatggggttggctctgataccatttgtaatgacctatcctctagaaccgtgcaacgcaacccattcgatgggtaggctaacttatacatagcacgccacttacacttttatcctcactttgtataaaagggttaactcggaagttgtatggttggagggacgtgaccttataagttggttctgcttttgttcaactagcaaggtggtatgaatcaatacacacaacattcatagaccacaaaggatacatcttaattaggccataatgtcacaccaccccctcctaccgatcgctcctctacttggacgtgatccctctccatgccccgctttctccatatactgcgcttactattcggagtcggcgcgcttctggaaagcgagaaagatggtgatggggactactttttggaagctcattagagtaactgttggagcaaaatgtttattaaaaaaatccaaaattattgggcatccattgttggtgatgctctaagttgtgagtagttatttggttaagttaacaagctaaaaatatagggtttaattgaaaccatgccactacaaacatgccattttacataaatgacactactattcacgatatcggttgcgtgtcactggagtttgggggaattggaactgtatcactttgttgctttttctgttaaaaatctttgttagcctgaactacatgtggggaagaatgaagagggaggaagaaggaactgatatgttggtcccatgtataggggtctaacagaaaacacaacagagtagcatagttccaattttcccaaattccaatagcatatagtcaatatcatgaatataaatggcatttatctaaaataacatatttgtagtgacatggatccaattaacccaaaaaatctaactcaacttggttctttgtgatcatgagttaaaaccgagcttgatacggatcgattcaagccaagagcctttttttttcaccctagtcttttttagaccacgaggagggaaaaaatgcatagcagtgtgattttccttttatatatttatttatagtattgttgttgttattgaaaacaaaaactgtacggtgaaaagcaccacgtagatttgtactaccaagtactcctgttttacaatgttgtaatacagtagtctactctctctggaaaaaaaaaacaacttctgagaaagaatctactagacaaataattatgcatattcattttgagaagtttgtttttttgatggtaggcttgcacagcatatatccattgctttggatatctgtcaaatcagatcagtcgagttgcgagacgattgagcataacggtatcctgtaccaataacgggtacttgttccacgaaagcaaaacacgtactccttccgtcctaaaatatagcaatctggaagggatgtgacctcttttatgggtgtccacatacatcaatttaggaggggtcacatccatgtgtccacatacattaacttaggagaggtcacatctccttttaggttgctatattttaagacggagggagtagccaacacattcattggtaacgataatggctttgggcctatttggttctctaacttaccaattaaatggtagtgccaaaatctggcactactaattttttggtagggcaaatttagctagcctatgtttggtttaataccaatataatgccaaattttagtataatggtgaagaagattctagaatatagccaacttgagcactggcactaccaattatttggtttcaatccaaactagcacgtttattatttggcactaccaattatttaagttaccaaaattttggtagggacacgttttggcttcaatccaaaacggccctttgtttagattccaaaaaattttggtcaaaaatgtcatatcaaatatttaggtacatgtatggagtattaaatgtggatgaaaaaaccaaatgcacagtttgcatgtaaattgcgagatgaatcttttgagtctaattacgccatgatttgacaatgtgatgctacaataaacatttgctaatgacagattaattaggcttaataaattcgtctcgcagtttataagtgaaatatgtaatttatttttgttattaatctacatttaatactttaaatatatgtccgtatagtacagatatttaaaaaaaaaagagctaaacacaacacacccaatgtgatgtcctcgtttcacagtagcgcagctaggtaggtaggcagccgccggccggtcagtcagagagctgacggccaaagcagcgcacccaaaccaaaaagctactcctcctactagccacggccgaatccaccacagtccacaggtacacacccgcgcgctttttttccctcctccaaatccaaaggggaaaaaaagaaagcggaaaaaagcaggccaggcctggtggtggtcacggtgaggaggacgacgacgtgacagtgcaaaaacgtggcccacgggcctgtttagttccaaaaaaaaacattacatcgacacatatataaaatactaaatatagataaacgaaaaactaattacacggtttgtatgtaaatcacgagacgaatcttttgagcatgattagatcatgattagccataagtgctatagtaacctacatgtgctaatgacgattaattagactcaaaagattcatcttgtggtttccaggcgagctatgaaattagtttttttttattcatatccgaaaactcctttcaattttcgatcaaacattcaatgtgatatccaaaaagttttatttcaccagctaaacaggcccgtactccctcccgcaaccaaaccacgcagcccacgcagaaatgcaacgcaacgcgcgccatgatgcctcgcccccggaaggattcgccatcgatggcgcatagcggcagcgtctctcgctcttctccctctgcagcagcaatcatggagggcccaccgggctgacaggcccaagtgtcagcgttgcagtgggcccacccgcgtcgtcgcgcccacgtgcgagtctggcacagcgccagctcgggccgatggggatcggacggcccccaaggccgcgagggggtttcctcgcccctgcgatgcgtgcgctgctgtggcgcggaaagctggtgcgcacgtgggccggacggagagaatggataaattggtggcgcgcggggggcaggtaaaaccgaacaccggccgtttccttgttggtggtgttggtgtgcttttgttgcgacggcgcttgtgcgcccccgtatttgccgaatcgagagacctctttgcctttccggggaaaaggagaggcatattcttcctcctctgctagcctctgtcattctacttcgctaggtgcttccctgtttcctgggtaggggaaaactgatgctagaaactcaagatcttttttttctaatatcccctccgtattttaatgtatgatgtcattgacttttcgactaacgtttgactattcgttttattcaaaacttttatgcaaatatgaaaatatttatattatgcttaaagaatatttaatgacgaatcaagtcataataaaataaataataattacataaattttttgaataagacgaatggtcaaacgttgaataaaatgtcaacgacgtcatacattaaaaattttaaaggtagtactagtcaatcgcatgtctttttttaccttatggaactaccagtgccagtgtccagtgggcatgatttggctaagccgcagccagcaacaaaagtccaacagtagtgccacatacacttaacggcaacgcagttgtagctatatggctgccgaacaaacccaatgttagttaggagtaatttttttcgagggacaacaatgagcaaggtgaatcagagagggttgtatgtcgtcatattcttagttcataggagattaattatgattaattttgtaggacttacagaagaggaagagagtaaccaatgtcagttaccgtttctttataatcatataaattctgagattaattatgtcggttttgttataatacattacttggattagttttctcgattatccatattggactaaatatacagaactctttagaattcaatgtgcattgggatttttttttctttaaatgagtcaatacagaattgtatctaacattttttttagaaattatagtttatcaatgggaaataaaaaaattgtccaccccaaaaatttcacgatttatatctcattatcctaccttggaaagttaataggccatatggtggccctccaataaataatatgttggtctaacaaaggtcatgatttgcacatcggattctagatactcgatagaccacatgtgcaatgccaacaacattggtcatcgtcattgtgttaccagtaacggctttaccgctacctccactgtaaccataaccacagccacagccgttgaatatgaggcacatatatgagcatttcatataaatttaataggcgcatgaatttcccaacggtctccgtctgtttaagcatgtactatgtgttattcttgtaataaaaaaagttggaagcaatggcacactcacgacttattgctatgtataaatagccacaacctgcatgttggtactattctagagtaagcttgaaatggacatgtgtagagctagccagaaaattgaagtgctcaatgttatacctacacattgtctccaagcatatctccaacatgttgttggcatgttgtcccctacacatgtagtcctcttgtagccaatgatgatatgtcaccttaggccattcacaatgtatacatgtagcattcggtcaacccatgacagttaggagattctccttcagctaggcttggggcatgaccgaatgaagttcgtgtagcccagattgggcacgtgttcttcgtcaattttcggatgtgcggcgcgagggagaacgatgcatccgcactatgagggtccgtggcccagtggtgacgcatccgctccaaaccccttgaacggcgccgaagggagctgctgccgcgccggagagggagcctcattgccacccttgcttgaaccccggccgccgagcttgcgttctcctcctctccgtgtcgccgagctcgccggcccgtctccccgattcaccggagagggacaccgcaccgtcatcggagaggagaggggagaggccgccgcgggaatcggagaggagagaggagaggtcgccacgggcactggcaagatgtagttgttgccacggtcttcctcctacgcatggcgtggggcggcccattacccccgatctgcgttgcacggagctcgccgcccacactgcccctcagctcgatctgcgtcggcccgagctcggatgtcgatttgcaccggcaccgtcgagctcattgccccattcgggctgccgctggctcatcgctcgatccgtcacagaacttctcgccgcccgtgataagagacctgcgctgaagagggagagggagaggctgccgcgggagagccaggaggggggaggcgccgacggagagagatgagagggcatcggcgctgtatcgatgggcacggcagacaactcagagaggggagtggggaaaggtagggatggagagagggggtgaattttatattcctttctaaattctagggtgttcattgtaaattttgtacctccacaaaaattgaaaaaaagtatgagatctgaaaaaaaaataccaggggctgaaatataagattatagccacttctagacactggtggagaaaccatctttcgtcggtcggccgatttccacaatagtctcggatgcaataaaaaccggggctaaagatgatctttagtcccggttcaaaagggtaacgggcatatttgatatttagtcccggtttgtgttaccaaccaggactaaagatgtctttagtcccggttcgaatgctgtcagggcctgtcaggcccccccgggatctttagtcccggttggtagcaccaaccggggctaaagatcactctttagtcccggttggtaataccaaccgggactaaagatcccggtgatctttagccccggttggtgctaccaaccgggactaaagtctcacccctatatatatgtcttcttcctcctccagctgcccgaacaagcttcaaaatttcttcaaaaaagaggggaggtcatgccaaaatttctattgaatttattttggtgattacatacaaatcgaaggtgcctaaaaggtttgcaacttcatcctccaatgtttttttttttgtcatactacatttgcacctatgttttgcacactttttttgtctccaaaatttagttgtaagttgatgagagagaaaatgtgtgtggggaagaaagaatatatagaaatttagttcatttgctaaacaaggttttataaaatagttgagaaggaaaactctagtgaaagttaatcttaaataatagaaaacaaactaaaatgaaaattaaaagaagtaaaacacattaaaattagtttaaaactttacaaatagtttttaagaattatttggtgtaatattttatgatttttgtatgaataaagatatcttataattattatatgactgtcattattgtaagaataattatttgtgtacggtttttttgactcatgtagatggatcggcaatggatgtacgctgaccggcggtccaaagagtttattgacggcgtgcactattttttgagagtggccgaagctaacaggcaaaggggttttatttgttgtccatgcaataagtgtaagaatcagaaggagtattctgcatccaggactattcatttccacttgtttgagtcggggttcatgccaagctataattgttggacatcccacggagagcaaggtattgaaatggaagaagatgaagtggaagacgacaatattccggactttgctcagtatgttggatttgaaggaaatcaaacgggcgaggaggaaatagctgctgatggtaacgacgttgcggatgatcttggtcagatgttgcaggacgccagggagaactgcgaaagtgaaaaggaggcccataaattggacaagatgttggaggaccacagaacttcgttgtacccaggttgcgagcaggggcacaaaaagttggataccactctggagttgttgcaatgaaaggcaaaaaatggggttagtgacaaggcatttggcgatttattgaaactcgtcaagaacattcttccggggggaaacaaattgcccgagacaacgtacgaggctaagaagatagtctgcccgttaggactggaagttcataagattcacgcatgtccgaacgattgtatcctatatcgcggtgaggagtatgagaacatagaagcatgccctgtttgcaaagcactacgatacaagattagacgggacgatccaggagaagttgacgggcagctaacaaagaagagaattcctgctaaggtgatgtggtatttccctataataccacggctaaggcgtttgttcaggaacaaggggaatgctagaatgttgcgatggcacgctgaagagcgtcaacaggacgggatgctgagacaccccgccgatggttcgcagtggcgaaacatcgacagaaaatttaaagaatttggaaaggacgcacgaaacatacggtttggtttgagtacggatggcatgaatccttttggagagatgagcagcggccatagcacttggcccgttacgatgtgtatctacaacctcccccctggctatgcatgaagaggaagtacataatgatgccgattattattcaaggccccaagcaacctggtaacgacatcgacgtgtacctaagaccactggtcgatgatcttaaacagttgtggaagaaggaaggtgtccccgtgtgggacgaggacaaacaggaggagtttaacctacgagcgctgctgttcgtaaccatcaacgattggcctgcacttagcaacctatccggacagtccaacaaggggtacaaggcttgcactcactgtatggatgaaacagaaagtacgtatcttaagcactgtaggaaggttgtatacatgggtcatcgtcgattccttgcagcaaaccacccggtacggaagaaaggcaagcacttcgaacataaggccgaccaccgtacgaagcctaaacatcgcagcgggaaaacagtgtttgctatggttaaagatcttaaagtagtgttcggaaaggggcctgcaagccagcatatagagagcgaagatggtcacgcggcgatgtggaaaaagaactctatattttgggagttaccatattgggaattcttggacgtacgccacgcaatcgacgtgatgcacctcaccattcatatgctaattataattgactagaggatttttaaaagttttaaatcacgtaagtggcaatttcatatgttaattagagtttttaacatttaatttactatcattcatatgctaattataattgactggagaatttttaaaagtattaaatttaatatatttttaaaactatcattcatatattagagtttttcacaatttaatttactatctttcatatgctacttatatatgactattcgaatttttaaaaggtttaaatcatgcatgtggcatttacatatgttaattagagtttttagcatttaatttaatataattcctacgctaagtacatatgatgattacaatttttattaattttaaatcatgcagtatgtacatacatatcttaattagagtttttaccaatataataatatcattcgtatatatgctaagtatatatgattattggaatttttattaattatatttgcttattacgatttatccacttaatttattacagacaaaaataatttttcgaagtaattgtcattaatctttgtactttaaataatgttaatgcattaacttctattttataaacacatatgtaagcgaaaatcatatgcagtgctataatctttagtcccgttcttaaccctaaccgggtttaaaaagaatttcgaaatagcaggaaaagatatttactcccggttgttgagaacaaccgggactaaagatatctttagtcccggttgttgagaacaaccaaccgggactaaagatatctttagtcccggttgttctcaacaaccgggagtaaagatccgggggtatatatattcccggtgcgccctcgtcttcttcaccaacacttagacattttcggccgatcgatctctctcggcctctctccttcgccgccactgcctagggcaaatccccgcgccgacgccgccgtatctcgccgtcgtctcgagctcatcgtcctcgccgccgcctccgcctcctccgctgccgccgcatctctggggtgagagccgccgccgccagatctcccttcatgcatctcgatctctccgatctcgatctctctccgtcgcgcctcccgccacgagacgccgcgccacgacgacaacgcgccacgccgccgccttcgccgccgcgcaacgccgccgccgcatgccaacgccacgccgccgccgccgtcgccacgccgccgccgccttcgccgccgcgtgcgcaatgccgccgccgccacgccacgccgccgccgccacggccccgtaacgccacgccgccgccgccgtcgccacgccgccgccgccgccgccacgccgccgccgccgtcgccacgccgccgccgccgccgccacgccgccgcgccaaccgccgccccaatgccgccacaccgccgttaattaagaaaatcttgttatgttaattgctactacgaatcatggctttaaactccatgtagggcttggtatcggttccgtcatttggtccgcggcaaatggagagaaagacttaggcggaagttcaaatttcctgtgagtacacatgctctacatttatatttctccgattcaaatacatacaagtatatgttaattagatctctcgtttgtcatttatttgtagtgcgcaaagtaaaagcagggaactaacttgtgcggctattacgtgtgcgagtattgccactgccttgtagaccaaatcatcaccacaagagagctcgatgtacgtacaaataaattcaaaatttcattacgtagcgatttcttgtttaattactaatcaatttcatacattcatatagtttattcgcatgagggataacctgaccacacacaaggaatttatcgcggcggttcaagaacaactcatgggattcatcaacgaagaaatccttgatcccaagggtgaattctactacgacggaaacacaattcaccggtccttagcttctgagctagcagcgagtactactacgtcgaaatcgtagctagctaggacatataatggattgtaattaatacatgactacatatgtttctatatgcatatgtacacattttctataatgtaaatatattttggtcatatatatatctatatacatatgcatttgcataacatatatatgtatgcatatatatgtattgaaacatatatatgcatggtttatatatatatatatatatatatatatatatatatatatatatagagagagagagagagagagagagagattcattagcatctatatgaatgtgaacaatgctagaaagtcttacattgtgaaacggagggagtagcatggatttgtttcgcgagatgtgctcgctaccgccagagaaacccgtttttactggcgggcgcttaagagctccgccttaaaaaatagagttgttttttttatcgcggacctcataagtgtccctcggcgaaaatcggttttcgctggcagctcatgacccaaaatcctcccatatatttttacaagcgtttgtttcattagttcactagcaaaagtaaaagtgtgacaccatgaaaaatcgttttttagtagtgtaagatgaatagagctatggattcttatggtaaagttagtccaattggatttgtaagacaagtgactaagggttgtttggttatcagttacacttgcttaagctggaatgatcaaattcttaatcacaccttagtaggttgaagaaaatcttgtcacacttttttcattgatgcccgggtcctaatatgttgggaaataatcttgccacaattattgctccaatatgtcagggttatggataccacatacccaatagtaatcgactaagctcggtagggcccactacataccatgtcctatacggaaacaaacctcgtatatagaaggagtttcggataaggaaggacgagtagagttctatatggaaacgacaaggactactcggatcgtatccatatttatctccctagttctacttggacaagagggcatctatgggtataaatacaatccccccaggaggagaggggacacacccaccacaatctatgacgccgcaaagccacaagccgacacacgtcgccagatatcaacatcagagataagcctagacataccccatacggtgcctacggaagtcggcaagagggatctagcgccatctctgatctcgccgagtacggattcgaggaggaagactaccttgtcgtcaactacgagttggttatctagccgccaagtcgacgccagctagataggttatcccaaatattgtacttgtgtgatccagatgaataaagagcaacaccagcttcggcaaacaggatatagggctattacctgtcagataaggggcccgaacctgtataaaaatcgttgtctccatctcttttacctcaatctcacatataccctggtaccaatgatccccatactatctaaataccgtagtcgcgatattaaacgtcgacacaatagaacaaccgtcaagttgatcaaacttgcctaaccttacacacgacaaaacgtggtcaagtgtgacgatgttgtggtacaatcggtgccttttactcttctttgtaaggccgagtttagatccaaacgttttgttcaaacttccaacttttccatcacatcaaaactttcctacacacaaactttcaacttttccatcacatcaaaactttcctacacacacaaacttttaacttttccatcacatcgttcaaatttcaacaaaacttccaattttggtgtgaactaaacacaccctaagagtagatcctaaagtagtatatgtgcatatagatgtgttcagtggtcaactaatcaaagcatacaaccatgctacagttcaatatatactcagaattcaccaacaaatagccattgaaggtcctgtctgagggggacttctgataactataacttcttatagaatcttcagctccccaaacaatttagatttttactatgagtatgagattttgtagtttatgtagtatctaaaaaaataaactagaagacacaacttttttaaattctcacacgctgcttctcaaaatctcaagctcctcaatacatggctaaagcgttcacatgtctttatgtatgaaaaaatccgaattacccctaacctacaatactagacatttaccatcctcaaccttttatgcttaataaataatcaccttgcaaaggctaaggcctttcctctgttatctgtgtcgcttgccatgtaaaagaaaaaaaacataggagggggggggaggatatcggagaagtgggccctaccgattttagatttgtttttggctagtgtgtgtatgccatgtatgaccaaaactgctgcggattgtgttagagggtaatttgtccgatttgaaagtttgagatgcgaaatgtctagttttttgaattgtgggggtaattcagactgttgcaaaagtttagagaggtaattcaggcgtgttccttttacatattcctactcatatcctcgtattgcttttctctacatcttcatgtaaaaaaaggtgatttagagggagatacgttcctctaaacatttttaagaagaaattgtgagtgtgttggaattgaacatgaaaccttagggattgaaaccacacacaccttgacactgcactatcatgtgcatctcttcaccgcatcttcatataaggccccatccttttcttattaaaaaatatattttacctcagttttctttaacatactttttaactgttaaacggtacattctgtaagaaaatttttatataaaaatgctttaaaatatcatataaatctattttaaagtttagaataattaaaactcaattataatcatcctctaatttgaactcaaatggtggctaactcgtttagactttcaatttaatcaaacaaagggtcccaaaaaaaagtctatgttaatcgagaaaggggatccacttcataaaaaccggagtaaacattataccagtggccccaaacgagagaaaaaaaatgattgaactcgacgctgtaaccagctgtatgtccctccgggccggtggggccgaccgagcagtgcccccaaagataccgggcccacacagctgaccggtgggccccacaagcccatcccctcccctgaccaaaccctagggttaaatagcgcgcgcccacgtttgcacgcgccccccccttcccgaagacctcgcgacgccaaaaaaaggggggagaccgccacccacgccaagtcgccaccctctccacctccgagcttctcgcggcggccgcgccccagcccgagaccctcccctctctctctcgtctcgagcgagctagggttttggttctccggggcgcccgcccccgcgcctcgccggcgggcaccgcgccacaccccctctcctcccccccacggcggcggcggcggcggcggtggaggcggcaatggatctgcagagcctcgccgtcgtgctgcgcgcggcgctcagccacgtccccgaggagcggaaggccgccgaggagagcctcaaccaggtgagccccctcccgcctccttccccccgacccctcccgaaccagcgcgctcgtcccgaactcgccaattcccctcacccgttcgacggcgccgcggcggccgcggtactgtttgatcgccggtggcggcgcgctcctagcgatctgggattggttcaggggctggtgatccggtcgaatctggctcgtggactgtgatgaactcgctgtccctgtgtgaacgatggggggtttttgggagtttgcggtggggggttctgattattctgatgggtacagggtgttttgtttgtggcgtcatactagtactcgtttcaggtcttactatggtaactgcggccatggtaaacttggtactgccgtatactgttcgagcgcgttgggttgttaggggcattaagttctggggtcgccaacagtaatttgagttgcttctctccttgctctgggcgagattggttggtagcttaatttactgttcaaatcatagtacaaactagccggtcaacatgttcaaatgtgggggactacataggcaactgaaaaatgtttgtgtcagatggaacgctggtattcttttctgttctttctgcaaagcgaacacatgaataagcagcatttttggaaaatgctgatctttttgctgttttgtaatcctatatttggtgacaccataatgttcaatcaagtggactatgcgtaccagcagagttgtgcaagctagtcagcctagagtacactaaacatggagttttatacttttattccgttatctatgctagtggagaatccttattcgaaaggaactacgtacttctctgacctttcttaatggtttcttgtgcctttccatgtacttctatttgtattgtggtaaatcttttcattagtaatgattgtctctttcctgttcaaagctagctaacatgcttgctggagacatcatgctcatttatttagtaatgagttgcactatcgttagttactaatgtaaactagttgtccagataatacttaataaaacatggtccctgagaagtcctgtactggtaccatttctggtttgctatgatgctaatacttggtaatttgtttcatttgaaggcagagaagggatgtacagcactgtaccaccatctaatatacttgattaacaggatattttctttcttttagcaagaaactgagtatacaagtaatatgaccaggcacactttagacagtggattgcttgtacgctcctcccaaagtgatctgcactaattattaagcatggcttaggttgcttgtatgctcctcccacaatgatctgcactaattactaagcatgacttagtggtagttcaaattcactgagctttgtgaaattcgtgagagcaagcactcctcaaacatccaagtcagacagttgttatatattttcccatcgcaaactgtactattttgccattttctgttgagcacctgtgttaataattctgtaatttctgcagtttcaatacgcaccacaacatctggttaggttgttacagattattgtcgatgggagctgtgatatggctgtacgacaggttgcaagtattcatttcaagaactttgttgcaaagaactggtctccaaatgatcctggtatgtagacgttggtagttgactgttgacttatttatgacttctgattacctaaagtatcgattgtttattctgtagaggaatctcaaaagatttcagaaagtgacaaattgatggtccgcgagaatatactgggttttattgttcaagtaccccctttactaaggtaaactgctctgttctagccaacagtttgtatgttgctaatgcttgtgaaaggcttgacaatcttaagagagctttgacttattgtgataacaacttcggccttcagtataccattattcttgttaataattaaatgttccttttgagattctacattgaattccttagtagaaacctaattcattaaaattgcatggttctgataattaccgtagtaactgctgagttccgctccatcttactccctccatcccaaaatataacaacttttagtcctcaggatttgtcccaaaatataacaactgctccaccaacattctcttcccaaccaatcacaaccctctaccattcacttttcccacctacctccactactcatccaatcacagccctccaccattcacttctacctactttcttaataaccgtgtccaactctaaaacttgttatattatgggacggagggagtagcatatatgatttgtcctaggctatatatttgcaaaccgttgccatcacggttacagtttgctagagggtaggggatgttacttgggcagtaataatacaccttaatgaaaggtgaaatggtgaataaaaagggaaggtgagtgaggagaatagtggctggcccatcatccctctgcacactagttcccctcctttcccttccttttctttccactaaagactctttcaaccctagttgctggtgctctctctcatcgtcctgtggatgatagtttcctcctctctagcacatgcagagttgttggctagtgatgacaaggtgcaaatgacgatggtggtgactaaacaacctctcctgttatctgcttttcctagttcagcaattggccattgtaccctccagccaactgggcataaacgatgattgtcatgggtgttagaaaccaaatcaccatgtttaactgctatccgggacaaatatgttgttcactgttgtgtcatgattaattgattatacatgtaaggtacaaccggcatgggtattcatttgtcactggtaatgtttgacataacacttatgcacattccaatagaatctaaagtacatgcctgattcagcctgttttgctatttagtagaaggtccatttcaactatttttgaaatatgataaatgtagtaccttcatatatatccctcttatttcccttgaaattgtatattcttgcggtgaaaatatcatgctgtcctattgatggcaacacctccttgacatgctgagaaatcttttcattggttgttttacagagcacagcttggtgaaagtatcaaaactataatacattcagactatcctgagcagtggccagttctccttcattgggttacacacaatctggaatcagaaaatcaaatttttggagctttatatgtgctaagggttctttccaggaaatatgagtaagtattaatgtctattcaattatgtttccttctatctgtgtgttttaaaatcattctgccaatttttgtttgtattttgatttgttctgcctcttttacctcctattatgtaattaatgctctgatttgggtttaaaacaattcgtgcttgtctgcttcattcttatttgtattattcttattatgtttgttcaaatgaccctctcttgcaaaattgctacataatattgttgaatgttgccatttacgtttcaacatgggggcaattcaccagttctctctagttgcatttattctgtgatgtcttcatgcggcattatatctgaatttggtatagataagctgtcacactataaactatatcattcagagttagttctttgttgactattcaccactgtattagtactggtccctttccctactcttgcttacattgcctgtgtcagctatggattgtgtctcaataagaatatctctgttgctatagagtgcatcataatatattaaaaataataaaaagctaatgaaatttgatagagaaacaaggaaaaatttgagagcaacccatccacatggtactatctgctaaatattgctaaagatattagttcgtgtgttctacacatttttatatttttttgagtttttaaaacgtttcacacacatgtttaactgtttgattgaacagactggtaaaaaaagcctgatgtaattgggggaaaaatcatgactgttgtaaattcaaagtttcagttaaagaattggtaaatgtttgatggcagaaatgcagaatcacatatcaccttttacactttcctggaaaacttgaagtatgtgtgctgagtataattctcttagtttgttgctgtttaggattaaatggttgcttcttgttatgtacgtagtatgtgtgcttctttgaatgatgtctctaatttacttttatttattttgaaggttcaaatctgaggaggagaggatccctttatatcacattgttgaggagacctttcctcgcttgctaagtatctttagcaaacttgttcagattgtcaaccctccaattgaagtagctgacctgatcaagctaatatgcaaaatattctggtcttcaatttatgtacgttagcttattataattaaatgatcgtcatcacttatctgtaatttgtactctttttttacacttacatttttccttttttgctttgcgtagttggagattccgaagcagctctttgacccaaatgtcttcaatgcatggatgagtttgtttataaacttgttggaaagaccagttccagtggaaggccaaccattggatcctgatgtgaggaaatcttggggctggtggaaagttaagaaatggacaattcatatattgaatcgtctatacacccggtcagtgttcattgaagctcagccctacctttggtaatcatttaatttatttacctttcaatgcactgtgcagatttggtgatatgaaactacagaaaccagagagtaaagcttttgcacaaatgtttcaaaagaactatgctggaagaattttgggctgccacttgcagattctgaatgcagttcgaactggtgactatttgccagacagggttatcaatcttgttcttcaatacctaaccaacaggtttgttttgggaggataaaatgatcatttttcagaagcattttgtgtccataaatcgaacctcttgcttcttttctgtagctttctaatgttgtttctgttctaaaaccacagaccatcctcttttatcatttcattgtgttttgctagatttggagcttccttgtttgccgctactaatcatcgagttgaaatgtttattttggttgaaatttggcctaacatgtattgaccaaataatcatatttggtaggcaagtcagtgtctttgatccatggaagattacatgtccagataagcttgtggtgaaagtataaaaaggaaatacctgtgctatgcatgtcaaccaaaaaactatttttgaccattttttatggaaatatttttgaacaaataagagcattcgatggacgtacaatttttctgaacaaggaaatgaaacacactgtgctgtgttgatctttaaagctatggatatgttgaactagccttcaattgcagtttttctgagatgtcttctaggcatgttctgttgtaattttgcctttctgatgattcctctaatgcagcttttgcttctattatgtctttttaggctacttcaaagcttattcttttttctccccctattctgcttttgatcacaagttattttgtctatattaattatgattttgttcgaagataagtaattattacattgattgtatattgcagtgttacaaagaacagtatgtatcagttgatgcagcctcaaatcgacatcattctgttcgagataatttttccgctcatgtgtttcaatgacaatgatcaaaagttatgggatgaagatcctcatgaatatgttcggaagggatatggtgaatttcaggaccctgtcttgctgtcaattagagtaggctatcactcagagtgacttagggatcctttgaaactctagtatcccaagcaaggcctagtatcacacgtttcctgtgtctcagttcattactgtaggttttttgctcatgcattgacttcttttgtagatatcattgaagatttgtacagtcctcgaacagctgctatggattttgtgagtgaattggtaagaaaacgaggaaaaagcaatctccaaaagtttatccatttcattgtggatatttttaggaggtaagatttacttgccacttgttgtcttcaataattacacactttctactcagtgaagtgcttcaacatatctgaaggcacatgggggtgacttcgattaatgaatgttttacagatatgatgaggcatctattgaaatcaagccatatcgccaaaaagatggagcacttcttgctattgggacattatgtgataagctgaagcaaacagatccatataaagctgagttggagcgtatgctggtccagcatgtcttccctgagtttaatagtcatgttggacacctgcgtgccaaggtagagtcaattgaaagttataattttacttgcttcttagctgcttttgacacattcgtgtatcatgtgcaaatcatattacagacttctgtttctgttttgcttattgtggaaaaaagtataaaccacttattttacaatgatggtggtctagttaattacacccaattcacatctaatcaatatatatgccactgaagatctcaagcattacatgcactgggtagtgaataacataggatgttcagtacgtggctctgatgccgcaatgacatgtgagcaatgctcctaggcttggtgtgagcctcacaatttgaggcatatattaagaattgtggctattcggtggcatagttcagagttggaaaataccattgcaaatatctcaaagttgggaaatgtaattgcatgtgtcattgtatctgttatttaaagctgagaagatttgtgcttccattgaactatcaaatactactagtggtgacaaatacatgctgttttggatattgacagtctaaaaattgcaactttgagggctctgctgtaatatatttgaaacctgataaattatattctcctgaaagtaccttttgagaatccacgcacatgacttacatgtatcctgtctaaaaagggagggagtggtggtggtgaatggtgaatctgccaccaccgcaccaccaactcccaaaactgacacgtgggaccactgtccatcccttctccaaaccaaatgcatggtagaacagtgaaagtcacagatagaccctggagctctcaaccatgatcatacttgaaagttaataataaatggagtgaaaacttggcaagcaaaaacctcgaattaattctaaaattaagctctaaaattcaagataaatttcctctctgcattgtgccgatgtgattttgaaatcggtaacaacatacaggccattttgctagtttattgatactcaataattcaaaattttagctggacatgtctaaaacgacatgcatatctaacacagcattagacaattattctctatcaggtcttctgtttgtgctatacgatgctaacttgtgatcaattttgttctttatggcatcaatctgacctattctatctaataggctgcatgggttgctggacagtatgcacatatcagtttttcagaccaggacaattttcggaaagctatgcattgtatagtttctggaatgcgtgatccagatctccctgttcgggttgattcagtgtttgcacttcgttcttttgttgaagcatgcaaaggcaagttttgctttgtgcatgccttaaattttcatactaaattttggactgctaaaaaaatatttgactatacctctgcctgtgcagatctcaacgagatacgacctatactccctcaactccttgatggtatgataattaaatttacttctgttaaccttgtacttttgacagtagattaatttgtggctgatcatgtattgtccagaattttttaaactgatgaatgaagttgagaatgaggatcttgttttcactcttgaaaccatcgttgataaatttggtgaagagatggcaccatatgcactggggttgtgccagaatttggtgcgttcttctctctgtacatttaaacccttctgttttgtgttgctttagtaacacattttttgtatccctttggtaggctgctgccttctggagatgcatggctagtcaagaagctgatgatgaagctgatgattctggtgctttggcagctgttggttgtttacgagccataagcacaatccttgagtctgttagcagtctcccacacctttttattcaaattgagccaactctgttgccaataatgcgcaggatgttgacttctgatggtcaaggtattgagctgtttgtggatagtatttcatatacatatactggtagtgttgtagcgtttagtgtatcctttccaatcaccatgatgttgcaaactattggtgtcatatgctgctcataaagaagcaacattcctaactttcttcagtcagaagagttcatgcatggcatgttcatgtgtatcaacagcacccacgtggttactattgactctgggtattttctagataagattaggttgaactgttagctattttcttaatgcaagggtggtgctttatctggtttcattgaacatagtctttagtccccccctcccccccttctctgtccttgtgcagctccatccgtggctctgttgtgccacttgggcccagggaaattccacaggtctaaggggattgtcccaaccatgcagattctttaactgttggaatggcaatagtatgtgttgtattacaaagttatgttcgacatgtcttctctggtgatgtattaattgatgatttacaacattaattctgctgattgtgagaacagcacaaacaattttattggacagggatgtttccaattaaatatttgtccatttcaaaactagaaaagttataataagcacgtaagtaatgttaattgtttatgatctaatataatgtggcagcagaattacaaggtattggattcttatgctaagtttgtttagtactaactacttatgatttattttgttgttttttgttcatacacttatgcttctaaaatatactgcagatgtttatgaggaagttctagaaattgtctcatatatgacttttttctcaccatcaatttcgttggacatgtggagcctgtggccgttgatgatggaggctctaaatgattgggcaatagacttctttgagagtatgacattttaatttctttatccatttttcagatacatgtattttctgcctttcatctttgtcgtcttattctctttgtttttcacctaaatggtgatatttttaaaatagcctttacagattcctcatgcttatcacatggaatacatgcattcatcaatatttgcttaagtcctattgttgttctgttccttttagatttaaataatgttttttctactccctctgtttcattctttatcatgatgtttttagtgccattctccaaaattgttgtgcatgactccaggtttcaatggtccccaaattttggtgccatttagatgttgaataatgtcttcacgtttagatgctgaatctgtctattcataatcttagtgtattggctaaaaagatgctacttgacataaaaaaatgtattcgcaataggccaatgctgtttcattgaaatctaggcatgtgccaacgcttatcatgttcaagtctcagaaatacaaagattttgcagtatctggtcaactaatctaaatatattgacatatgaatacaaaggttttgcagtagcttgctccagaataggttttgcttttttcatctcctgggaatattcctgctgcactaatataatctagtagtttgtgtgccttgtgcagctgataatttgctctacttgggctgtcgtcttgaatgaatttctccatttatctgagtggaagatgtccatctatcttccatttttgcaaattgtttgaggccctgttattagcaaatgctaccttgagaaaagtgcattttgcatttaaatttaatagacttttgcagctttgtcttagctttttttttgttgtcttccccacagatattcttgttccattggacaactatgtttcccggggatcggaccattttcttgcctgcaaaaacccagattatcagcaaagcttgtggagtgcactatcatctgtgagtgtgttttgggttaattgccatattttttttgttagatttcacaatataacagtgtactagcaatctagcatatgttgataattttcaaatttgtagattatgatggatcaaaacatggaagattcagatattgagcctgctcccaagctcattgaggtggtttttcaaaactgcaaaggcaatgtggatcaatgggttgagccttacctcagtcttacaattgatcgattgcgtcgagcacacaaaccatatttgaaatgtctccttgttcaagtggtaagatccctttgttttcaaatcttgctaatcaaatgatgttttgttagtgttgcctgagatcactttcttagaatcattgtttcaagcttatacgatgaactggtacgtgcggttgccctggtaactagtaaatggcggtatcttttttgtgaacttgttgaactgtactttttttaatgtattccacaatacaaaatgggaagcactgagacatgcttggcttggttttcgcccattctttctgttacatgtagaacaagtggataccaataagtacatattttaaatataggaaaatgggaatgaatttaatctatatgaagttggttggagctttcctttgggatgtgcaggagcaggaagcatatgcgattttaaaaatgtaggaaaagtgagaattaaattgaaatcagggaaatcaatgagtatatgcatttgaaccttttttttgtcatcatatctagtcattttcaggcattcagtatccatctggtttggaggctctactgtcatctttccacatgcaaaagtggctagcgccatggactacacaatgtggcatcaatctagagttgagattagtgatggtagtgttgtgctatgtggtggcgactgatatggggatgagcttgagctcagggaggcagatgggttgatctttggttctacaatgagaatatatacataaatgggacttttaaacacttgataacctgatctacaaggaaattaacctaatacctgaattacatattttctctttctctggttgctattagttactgtaatgccggtcttggatgagctggtcagcataattgacatgaacaatggttgggagcagagaacacaaaacactgcttgtatacagatagcacataatgatggtcttatgtagcagaccccttctttctgaaaataatttttgtataaacgagctgtccaatatattgctgatcagcaacagccttatggttaatatttcatgttacagttatttatatccttccatcgtatggaaaaatcatctcttgggtttatttgtctttggcaagagacattgatagcctactatttttgtttggttttatatatggttcaactaccattttataaactatatgtgctatctatgctctacgcatgttactaagcgcctttatatgctgcttgtagattgctaatgcgttctactacaacccttctttgacacttgcaaccctacataaacttggggctgtgactgaaatttttaacatttggtttggtatgttagaacaagtcaaaaagagtggtgtacgagccaattttaagaggtactttttagtagttttgtcagtacttatatctacctcatgttttctacagtgaactgaaatcgttttactattttgtttacagagagcatgataagaaagtttgttgcttggggttgacctcacttattagccttccagcagatcatattccaggagaagccctgaatcgtattttcaaagcaacacttgatctgcttgttgcctacaaagagcaagtggcaggtggaatatgaatatttttacgattcttctagtaaattggagtttacttttctgcatgatatatttgtttaagtttatgaagctgagtaagattttcttgatatatttatctatgcttttctctttgatgaacagaatctaagaaacaagatgatgctgatggtgatgatatggatggttttgatgctgatgaagatgaagatgatgatgaggttgaatctgataaggagatgggacttgatgaagaagatgctgatgaagtaaacagtcttcatcttcagaaattagctgctgaggttagtgttgcattctgagtactaaaattgcattattggcctcaatatttttccttccttttttgtactagtaagaataactgtctacacaaggtactggtcggtttgcatgaatatttcttccgtgttcaaattcatgctaatgtaacaaatgcagtggcatgtactagtaaaatttgtattgatattcatcttctgtttttatttaaaaaataataatcatttttatggtacaggccagaggcttccagccagctgatgagtatgatgactctgatgacgatttcagtgatgatgaggagctgcaatcaccaatagatgaggttgacccgttcattttgtttgttgaaactgtccaaggtaaagtgaatccttgttattagaagtttggagcatacatgatatatgtgaagtttctcacgagtgcccactgtttttgacaggcttgcaagcatctgatcctatcaggttccagagcctcatgcaaactcttgattttcgttatcaggcccttgctagtggcatagctcaacatgctgaggaaagaagagttgagattgagaaagagaagttggagaaagcaaatgcacaatgattagtcataaagttctttgatattattgccatttcaccgggttgtggaagtggtgggccatcttgtgatttggcgcgaccacaggcaatcaattttggagccttagtctgccatttaggcaggaaaattttaggctcgcaaaattttatacttgcgagagttgaaaccggtgatagagccttcttggatagtctcttcaccggaagtcattttcctagtggcccatcggtcggtggcttggattgtgcaagcgtgacactgggaagtttctccaatttgagggcactagcttgtcatgctgtttgggccactaatatattttttttgctgggggcttagcatttgttggagagccccccactggtggcggggtgcatctccgtatcacagtttgtagggcagtttacatttagactgtagaatgtatatggttttgttcttgtctagatcttaccgtgagtttccattggtgggctgggatatacggttacgttttgtttttggcaagatgtatcttggttctctttttttttgtggaaatttattttagaaggcaagcaatttcctggtatttttttgctgcatgattaccatgttcatgcgtgtggtttaacctctcagaagtagtcacgaatcacagggaagctgaagcatttgatgtgaaaataatcttgctgaattatcttgtttctattcgtcggaacgaagcatcagtcaaagccttgcaagcagcacgcagcagaattcttctggttcttgcgattgtgcgatcagggaaaggtgtcgtttgcctgtcactgtagaaagtctagttttagctttaggctttagcagctttctcccatccacgccctttcatttcctagcgagtaccatagcattggccgaggagtctagagtgtcattatttggcaactaatttcggttgatatgactttgatatgtgaaacagcttgcttggacgttacttaagtgcagtaaatgtatttggctagaaatcaatatgtgagcctgtatctgtatgtagactaaaaggcgcatctataattagaacaatgtagtgttggcgtgacacaaagaaacaaaccctagccaggccggcaataattcgggcctggttggtcaagggctaggggtgaaaacggtaacggtaattaccggccgaccggcattcgttttcgactttctaccggtcgagccatatggaaatggtaatcgaccgaaacaaaaatggaaatgataaaaaatatggaaatgaaaacggaaatggttttgctgttataccgatcgtttccgtatttaccgtattctcgtggaaattaccgtttcttataatatggtaattaccttattctaaatatgtcgatattataggacctgtctatacttgacccacagcttatagattgaatgactcttcaataaaatctctaacttttgtacatggctaaaatgaagttaatttataatttatatagtataaacttgaatttatgtatatatatatatataacatacttatgtaaagttaaatatatgtttttatagtttaatgtttccgtatttgttaccggtttccgatctgtaccgacatgtttccgtctgtattgttccgtttctgattttccgatatttccgatatcgttttcgtttccgactttaccgtttccgatttcgtttccgagaaaaatatggttacggaaatggttgaggctgttttccgatcgtctccgaccgttttcatccctagtcaaggcagctgcaaataaaaggtaaaagcaaagttgccaattcagctgctgccccatcatcggtgggtgtaccgcgcgtgatcatatattcatacacgcagctttaccacaacagtttcccccatgcaatttgcatgagtgatcgagcatgcctagtcagtctatctactgctactactagtacagtacacttccatgtggcgctgttgggaggcagacagcgagagagacgggatgcgagctcagacctaacaatggcggatggaacgcatgaatgagttgtgatggattggattgagctgacggagctgcacagcagccggcctatccctccctctacttcttcatccccacatgcgtcgctgtgccgtgtattatgcttctgggcacgttctcggcagattattagagcagattcaacagtacacggtaaaattagccatgtcatctaaagcttcggttaaaaatacttcatataatacaaggatgcggtatatgatctgtttatttgtcagtagtttaagcagaccaattactattgtttctttgcatatctcactgtcctatcacaattcacatgcaagtgtagaccaatagcagttgcttgccttgtctcgatgctcacgtacaaccggcggtaatataatcgcccgttcacattctctttccttctctccttctgccaactcatttcttttgctagcctgggcattctaccgtcagtttaaaacttctattgtatcctctcatactgtataagatgtgtttggtctgacggtaagattgaatgggttggggggcgatccatggtctcctcatctcgtacgtggatgtagggatccatatgctaagtgggtggataggtggatagaataagtcaaattcttttatttgttttgagtgaatgagatgaggcaaccttttattaattaataaaaatatatattaataatcattaattgtgctgtaatcaatactaacaacaaagtataataattaattactaaccaatgacatggcaattactaattaacaacataacacactaattatcactaaccggtaactaatgatcaaggtaagaataagtaaaacgtggatcgcctcatcccgctaaatttgtcgaatgaggtcatccatcaaagtgaatattatgttcagcggtcatcccttcgcccctcgcccataaaccaaatacatgcaaaagcaagatgaccatctatcatccatattcatccctccaactaaacaaaccctagctaatctacttctccgtaccaaaataagttggatttctagctttttacctactcctagttcaccaattcagaagttctatccctttaataccttcttaccttctccattagtcatcagaggagagatctgctaattgacatttttgttatgtggatttattggtacagaggatgtgctctcataatatactcatacaagatatgttaaggcatgatttggagaggaaatcatgaaaaaaaattggtgagaagattagaaataactttgcccttcatcatgataaacatgatacatgtttacaactatagccaacgagaagtgatatatgctaacaagtaataataatctataacatgttaagttttactctagcgtaagaagaacacctggacatccataaagaagtaattaaaaagtttcaaaatctatggatgtccaggtgttcttctttatggaacatgaatgcctaaaagaagaggagagaaaaaaattaaacgtgcatgtgcatttatatgttcatggactccttattaaaaatatgaggatagctctccatatgaaaacaaagtaaatctgtataatagcacgctggtacaaatagagaaatgcgcttatgtttcgaaatatcaggccaaatatactgatggacgaggtccttcgaagaagatgttatcctagatagttgtaggatgaagattccctcaaacaagttattttagcatggttacaaataattaaattttcgtgctttttctatatgtaatttttaaattctttacaaatagttataaaattagctattgcatcaatgcttggcagcattttccattagtcaataccgactcagagatatagataataaaataaaacgaacagccaaatactccatccgtctcaaaatgtagctatttctagcacaatgtcttgtccaaaatgaagctatttcttcacctacctcctcctctcaaccaatcacaaccattcttcttcacctactttctcttttcaaccaatcatacacttcctccaatcattctcacctacttttttaatacccatgccaaccttaaaaataccaaccttaaaaatgacatgaaaaattacaaccgcactaaccggcacaatagtactatactcctatataactgccgtcgtcctttggtgagaacctgtcacctactcgtacagtacacatatatacaggtcagctagctatctgccccccacatgtacagtacagaacactgccactgctgcactctgcatctgtatgcaagcagtatcgatcggcatcctatcggctacaggttggttgatgtgtcgtgtgcagatttccacgcacgaggtgccccattggtgacactgccaagttgccatatccatccattcgtagctagtgtgagtggcctactacacatatataattgctctacacgtgttgctcccttatatgtgggatgcatgaacatgcattagagcaagtttaatagtatagcccactactagttccaatttatctatagccaatctaatagtccattcatacaatagttgcttagtatactattaatatatggtcccacctgtcatacacacattgcgtctcggagtccgcgctgcagctggctacagatttgtagcccactgcctttctctctcatcttttatctcattaaaatatatttacagctacagctggctaatagcctgctattgtacctaatcttacaacactgtttaattcactcatcactttactgactagggttaaacctatcagattgagaaactttctgaagatcattttcttaattaagggtcaattcgcttggtacacttgtaggaatcacggagaaaaaaaaaaccaccacacgtatcattaagggcacccgcaatggttatctatagactctctacaagagatccatgtcagtatatttttctacttgaaagagattaaatgaagagagagagcaaagctatctactaacttagagatagtctatagagaaaaacgaggcaatgcattagagagctatagatatccatatagacatactattgagatgatttactattaatctagtctattgctaagatgtacatattttatagagaacaccttactttaccattacgggtgctctaacacatctggatacaagtgtcaactctcaggtgtcattctcacgcatactcccttcgtccaggattataagggagtattccctttattgcagtaattaaggaagaataaaagatgcatctaagaccattcacaatgtacacatgtggcatttaaccgcaaccttccacatcaaagattccataccacatgtgcttcacccgtgaccaagtgaagaacggggagccaaaataggacacgggttcctcgtcaaaaattcgttagagtggagagaggaacgagcgttgcatgggagaggaacagggggaagcaggaagagaggagcggcgccgtcatgggactcgtcgccacccccggctccgtaggccaccgccgccactaccggagaggatgaggggagagtggaggagccccggagaggggagatgccgtcgacggggagaggggcggcggcgcatctgcggcttctcgacccccctccctcccgctcacccccacccctcgacgctctgctcgactcgtcgcttgagatggccgccgcctccgccggagaaagagggagaggaacagggggaggggagagaccgccagcgggggaggggatatggccgcctcctcctccgcttgagatggccgtcgctgccggagaagagagggagaggcacaggagggagaggagagatcgccgtcggggagaggggagatggccgcctcctcctctgcttgagatggccgccaccacctctccccttctccttccttctcctcccctgtgccgcatccgcctccgcctccatcgccgccgtcctccctgctcgtagatcatggcgtctctgcctccgccaccgtcgtccctgcttgcaaaaggggagaggggcgcggctttggcccatggcgaaagagtcggcggagcggcttggggtggcaaagtccccgatgaggagaggcgggggtgctccgccggcgccgcttcgcgtcgtccgcccggagagtgtggtggggaaaatggtgaaaggagagagagggagagataaaagtgagtggctaatatgtgttcttggtctatgtgaaatatgaggctcaataaaattttgggacgcactgctattgccttaagagacgagaagtacatattggcagtttggcaatgaacataaaaaccagaccaagttgacattaatgagtttgtgagagcatactattacaaaaatggctgcattcgtttagggaagaccgtgtgagaaaacacatctttcacgcgcacgcttcccaaactattaaacggtgcgtcttttgcaaaaattttctataggaaagttgcttaaaaaatcatattaatctatttttaaaatttaaaatagctaatactcaattaatgatacactaatggctcacttcgttttgcgtatcttcccaattttctcaatcccttctcctcaaactcagccttacacacattatagtttcaaacttaaatttcaaacatgctctgtactacacgtgaattcctccgcatttcttttttcagatggggacactaatctctgctgtactgttgtcttgggataaccaaaatcccatataatcttcgacaaagcaagaggccattatcctctataatcctggacgcagggagtatgataatatttcacaactcatatatcctctatattttttaaaaaaagttcttttcttaaaaatacacacacatatatatctcttgacatttatgaaccctggtgtatttacaagaaatactccagattttacaacggggagtaattctatttaaaacacatccgccctagctggaaaattactttttatacattcaaccaccgaggaattatatataattttagaggttttcaaccttttgtagaacaaactagctagtggtcaaagagttgcattatattgtaaagatcgtggatgtctaaagcggcacattttcatgacaggagtgactgagcatattaataacatagtaagtattacatcaagaaaggcttaattgatcactgatcgaaatactttcaattcgagtcaagaacttattagctgaaaaatcttccctttcttttctctaaaaaaaaagcttctcatacatatgctctccctgtattcacatttaacaagtactccctcgattccacgaaaaatcaatttctggctatatatctgtatttagcctatacccatatacataatcaaagttaatttttttaaaataggatggagggtgtacccacagtacacaacttgcggatatcaacactttttcttgatcaaaatcgattgagatatatttgtgtatgtttgaatctgttatatctctactattataaaaattgaagacatttttttcggtacttttggtacatcatccgtatatgagtcggtttttaagttcgtcgctttggaaacacaaatctgtatttaagtcgttttttaagttcgttcgcttttagaaatatagaaggaaacgtataagaaatctctttaaaaaactcacattctaactagatggtcggacttctaattgcagcacatgattttctaactaaatatatatccaagcgaatttaccacaataaattttattttaactaaaccatataataataataatatgattaaaatagtgttcaactgttgcaacgcacgggcatttttctagcacatatatatattcactagttgccagctaggaaaaaagttgcagtcttcaaaaaaaaaaaaagatggaagcaggttttgcattgctgggtggcggttgatcagctactagccatagctagaggcctagagctggagtaggcatgggtgtgtgtcggcgaagtgcagcgcatgtgccccttgaggggcgcgcggctggatggcgcaatttgcatggtcgtccgtccgggcggccgccctcatgcatgcacccatcatccatcatctatgccagcggcaaatcgtaccccaccatatgcatccctgtcactgcctaaggcgtactacagtacgcacactaaaccgtgaatagtgctgcgaccacatgtgtacaccagtatgtacatggtggtgccatgtgcttggatgggctctttgcaatggtggtgcttttgtcatttctctagggcaataggggttaatttctttgtgcaatatttgatatataaccatttgaagagaaaaaataatgtacatgtagtcatatctggttataccaaatgttgtgtcggatgattatatatgatctgggttatattggatatggtttgttattttatgataccatcatagatatttgaaaaccactatgaaatgtagctctaaaagctgtacccagtatttttttatggaacttctaaaaaaaaatctatgacttggatgaaaaaaaatattttcatttttttcacatgttatgttggatgattatagtccaagttatatcatatatgattatttccaatgatgtcataggttgatatttaattaactaattggatgtccaaatatgaaagacggttctaaagctatatctaacatatttttttatagatgttatgaaaaaaacaattctatgacttggatgccaaatatatatatatatatatatatatatatatatatatatatatatatatatatatatatatatatatatatatatatatattctctagatgcaccatgaccatttgcatgggagaaaccaaaacccattgtctaccgttttgcatgtaaaaaccaccacccccatctaaccctttttgcatgttgtagttgcagcattgtaaaaacacatttaagctcgaagagaaattaaatcactatataatgactgaattaagtcagaattaataatagactggattttggactcggatgaaattaatcggtcgtgtatatatctacatttgaatgtttgaaaaaaatataagagctagcatatattgagttggcatcgttatgcctgttgacttgattctaccaagtagtgactaggtgtgtgtaaccatgcttcactgctttctgatcaaaataaatgagtaatttcataacttctaaagctagaatcactacttaaaaataattttagtgggcacctcctctttatttttacaagcagaaaaaaaatatccgcttgcaaattaatatcgatccgatctttacacatacgtgaacgaggcggtttgctagcttggccacctgaaaaacttgttttgaccgtttggatgatttctgtagtgaatatctcatagcttctaatcacggggcacatcattttaattagttaaaatggcacctatatatagtatatatatgaatgtttcacatagctgttgacaagcaactgcctattttttccttgtactgtttgctctaatttatctatcattggcccatttcctttaatcaattctataatatgatttatttttctcatgtttcatttggaaatcataagacatgatgttttctagcactatgcctccatagaaaatatgaaacttttagcattcaaaatttattgcagattatagcaactccatatatatgtactctcttgtcgatctctactaatcatatatataatatcatcttatataatttcttcatctattattatctcaataaactacaatagtatatatatacgtggcccatttatttgcatatatctctttaatttgcgtgaagagctctaaaagtgtttatattttatattttgagaaggagaagcttgctgtcaggatataaagtcgagctgtcaacatacaaccctaccaatattatattgttgggcatatttctctgcaaaaaatgtctctctgtcgggaagacttgtcaacacagatcttaattaactgatgctgtttcctatcatcatatggacagagaaaacttttattctaaatagttcataaaactgtgggctctatctgatgaattggctaggtcatagtgcagagaacacggtcctaaggaaaacataaagaaaaaagaactaactaactattaagaaaaactcaaaattgacccataacttgaaagttttagcaaaggaaaaagacccaacaaaagtctgcaatacctttgtcacttaacacttacaactttgtacttgcctcttttggatattttatttagataaaggattttcattaatctggtctctataaccacgaaggatatatacaaccatccttcgaatatctatctctcctcatttccccatcaagttcacaagaattccttgtcatgcgttagcaaaatcaaattggttacccttgtaagcatcgaatatggcacaactcgaaatggggccgggctcactcgttagttacctattctgtcccaaaataagatcaatttggtcttggggttgaaaacaatgtgtgaaggaaaaaaaaaagtccaaaccgaccccattaatatacatatagtgttggtatatgggtatgtaaaaatgtagttaaagggtattgaacgaataaaaactcgtcgatttacagatcaatataggtaaaaggatagaaataaacttattttgggataaagctcttataggataaagatgaacttatttttgggtggagggagtagattatatcctatatacacttatcatttgaaaaaaaaagtccattttactcttccgaactattttgcgagagcacttaactctctaaacttttttttggctcatttacactttaaactattgaaaatggtccactttactccgtaatggtatttccgttttatttctctatgtataagttgtattttgcactaaaattttggtaggatgatatatgcattacaacttacatctcaatattttttagatttttttatcacaatattttttatcacagtttacatgattggaagcacctaaattaaactaatttaaacatagaggttttaaagttcaagcaaaaggtcatgaaaaaaataaaaatctttctgaattttgataataatgtcatctatggctctaaaatgttttagcttaaaatacaacttgtataaagagaaaaaagtgaaatgttattaagaggtaaagtgagccattttcaatagtttagggataaaatgtgttactaattgcgtgtgcattatttgtggaaaggcaagaagtaaatctcgaacacaaattttgttcttgccatgttctcgtgaaggctcgatataaccttgacgatatatgatttatcaaataaaatatcacttatcttttttattctctgaacaaagttccactaaattaaacatgaacttattcgaatctaaactgaagaaatttgagtgtagacctgatttttttgggtatagtatggaaaaaaaatcaagggagggtctgagatgatgagatctcagatagattatgaactatggtaccatatatgatttatagggttatcaaataaatcttagcttgactatagttagttaatcacaaatgtactattgcacgtttttatttaccctttttcacaatatgctgttgttagatgtttaatatagtatgattgctgacaattgataatattaacctttaccaaaatatactgatctaggataattagaattaacataagaaaatgatatttgcaatttgaccaatttaagatcatatatgtaatgattattacacttttggttacaacttattcttatactcctatatgattttaacgcttagtggataaagcagtagtttattgaatatggaaaattagtactatttcttgaacagagagtgggagagggagcaaagtgcttgttccacagttctttctcaactccaaagtccaaattaaagcgaaaacagtagtacatgacaacctatccaaccatattggatggttgtgacctcacaggaggctattgggatggcctacgtttatcactgcatgtgtgccaccggaattgaagcttgcaaccttgcagtacactcacacacatacacacaccaggtgaattattgcccaaatgccttgtacaactacaataattctgcatctatataaaccgatagaggcataccgaagagcgacgcaatggtaacggctaccaccagacctgaaagagatgagtgtgcttgtgcctctctctttctctagagagagagatggagttcaattcagtatcgagatgtacatcgaggctaaaggaagaagagagagagtacagccttagttcagatcacatatgactatcttttgcgagtctgatcgatactctgatgaaggctgtaccctctctcttcttctcttagcttcttgatgctttctcttgcagcttcagataataccatccccatatgtgatatgtctggctttcttttatatgtatctatcttcagattcatacgcattatttggttattagttttcttttctttcagctagttaatttgtgcaaaacgctagttaccccatattattttctaatcacaccttgtttatatattcgacagaactgatttatatataattagtgagataactgcagtcctgatctacaccatgcatattatctttagaacttttcagcactgcaagaatctgaactatgtaaattggagtccaatgcatgatatatatgtgatatgtaatcagatcttctctcaagaaaattgaggtttgtctccaagaataattagttctattgttacttgatcagttcatggtactatgtatgcttttttttaatctcttctgattacaattttttttcttgttttccaagatttttttaaaattttctagtactggacgatcaagctataggtagaataaagggtttgaataatttaccatatttatacatgcgttttaaaatatttaatctgatgcttaattagagataatacaatgaataatgcaatatatcacagttattacttgccacaataattttctatgttatcttgtgattttttttttcattcactgacagcaacaagagacacccatcagtactgtgacggacaacccatgggcgaccctacggagagttctaattgctatccatcattttgttatagctaatgttgggctgaaaagaatcaggatatcttctaattaatcttttttgtttgagatgatgatcatcattttgtcatagttaatgtcgatggtgatgattttaaaacaggaaaaactaagtattttcgtcgattaattaattcaactagaaaaagaggagatttgaataaacatcaaatctgatgctaggttggcccaaatatcatatccaagcaatctatcgtattggtagagtataaattaagcatgaaatatgaaaatatgtactttgtatttccagcatggtttgcatgcaagatctttttgcagtacattaaataattcaaccaatctacacgatgatttatccaatttggcagatatgtactccctccgtcccattttaagcatagccataagtttccatgtcaactttgatcgtctattttatttgaatttttttatgattaatatttttattgctataagataataaaacatgaataatactttatgcgtgacttatgtttttaattttttttcaaaatctttttaaataagacggacgattaaagttggacacggagattcatgtctgcacttaaaataggacggagggtttatatgtagctaatggaatatatttattgagggatataatgatatgatggacattttttaggccaaagatcgatcacggccaatctggtccttaatttatcaagaaagctagcaatattgtgacaagaacctcatgtaccatgaatgtttatatgcttctgatcgatcacaggtagaagggtaacttttcaataagatgcatgtagattttccagataagtttgttctttatttatatacttaacaatataatatccaacgtgttactgcgggatttgtatgaagcaaataaataatttgagtaaatggctacaatatatgtgtcgaaacatgatttcggcaataataaaaaggggtagcgcacgagacctaaaagtggatggatgcagagacaaaggatttagacaggttcaggccctctcaatgagaggtaataccctactcctgtttggggatttgaatccaccgggtgtgtattgatctgacgatcaagttgtctcatgccccctagagggcttcctgcccaccttatataggatggggggcaggattacaagatagaaaccttaaccaatacggtataggtttcctaaatctaatttacaatattatcaaaccaggactttaggctgttccgtaatatataaggaaaacgtaatacccgagtcatgatctattacatattccatagatataagttatcccctatgactagtcggataaccatgccgtatgggtatggggtacccataatatccacagtagcccctgagaccttcgcagtcgaaaagataatcttctctcgaaccagattactccaaagccgagtgcttcaatcatctttgtcatggtctcccgagtacttttaccaaatctgaagactgtggagggctgaaaaataaagtcaggtgcaccgactagatgcacctaataggtgtagcccccgacaatgtggttaattgaacaaaccaagcatatagtcaaggaataaataatccaaccaaccgagtggttttgataatcgtaatcaaccaagtgacttgatatcaatatatagcatatgcggtgtgaatcctccaaataacatgatccgagtgatataccaactgctttgtaaaatatgatgagtgatatagcaaaatagctataaagaagcttgtatattatgaataaagaaatttccaaagtattgggcatacgccatgcgcacactgctttaacagatgtgcttaagtccctagaagacacatggtttcaccacacctggaaatatatggcatatgtggtgtaaaatccgagtaaataaactcataaaggatttaccaaccgcctagaaaatgaccacaatatataatcagcctaagccataatattggtcaataaaaatgcacacttacgtggcgaaaagcaacgatattgtatccaatcaattgcttaaaaacccaaacagcaccatgactatattaaaaagtcagcggggcagctatataaagctttactgtttgacaccttttaagatgcattgtaccaactcctaaaaagtcgagtaactgcggtataaaaggattttaaggtattgggcacttgatcacgcgcactttggcctaagcgaaaagtgcctaagtccctaaaagaacgtgacaggccacacctgaaaatatgggctgcagacatattaggcctaggccaaaaaatatgccttcgacaccctttaaaggatgacgcatgtaacatgctcccgagtaataaatcttccgggtaatatataccaagtgcagctcatatgaatagcttctgatctgaatgattatcccttataggatactccaaaataaatataataattgaatcccgactggcacaagtattcggttgatagcccttacggggaataataattggtccagtctttgagcatagaaaatagactcatgactatgaatccatgtggaatgtatccggaacaagtccaaattggagatataatcctcacgcttgagttgatgagcccctgagtatatagcttgtccttctgtcataatcaaaattgtctattggcaataactgacgcagtcggcatggagatgaaatgaccaacatgaagacgaaattgctcatcagaagtaacggaagatgtcagtggtagtaaagatgccaccaatcaaatgtaatgaagttgcataaccatggaggtgaagaaaccagtcggcaacagtcaggtcagctagcagtgaagatgtaggcgcccaacaacaacgaaagaacagtcggtggtgacaaaagcaaaccgacgatgaagacgtagacgcgcatcaacggtgatggcgaaatccatcaatcatgaagatgaagaaaataatcggcggcgacaaacgcatccgacggtaatgatgattagcggcaacagagatagccgactatgatgacgaagtttcccatcaacggcagcagagtaggctatgttgatgaggcttgacaagatgttgatgaagatgacgatgtcggtgatccagtcaatagcgatgtagcagccgatgataacgatgagatcctctatcggcagttgcgtagtaggccaaccgtgaagacaaataattggaggagagttgatgttgttgcccaactcgtctaaaccgaaatatttgaagttgttgaagtagaatgtctgttccgaagcaaagatgaagataatgactcctggagttgactcattggctgattaattgatttcttcagcttgacataaaatttgtcaaattttgagccttgtatttgtgtagcccccgactctttgattagttgggaaacaactgaacatagagtcgagaactgtagcttcttgtcgtcgaatagtcattgcttgattgaagatatgtgttgaagatgtccaagtagaaatcctgaatattggagagccacttgttgtagtaaaatatcatggcattgcatgccgagatgtcgaggttcacaaagacgtcgtggttggtgaagtagtaaaacttgcgaagtagcagcaatagagtttgccagtgccgaagataataaagatgaagtcgctccaccatgatgacaaagttgcatcgccgtgatgaagtgaacacgagtcggcggcaacagaagcaaactggtagtgaagacgcgcagttgtgaagataaaagcaccagtcggcggcggcataaccagtcggcgacggaagatgatgatgtccatcagtagtggtagctgtataaaccagacgtagaggtaagggcactagtcagcagcagacgagacgaccggcgatgaagatgtagatgcccaacaacggcggcataataggccagccgtgcaggtggaaacaccagtcggcgacggacgaggcggccggtcggtgaagacgtagacgcccaacaacggcggcataataggccagccgtgcaggcggaaacaccagtcggcggcggacgaggcagccggtcggtgaagacgtagacgcccaacaacggcggcataataggccagcgagcaggcggaaacaccagtcggcggcggacgaggcggccggtcggtgaagacgtatacgcccaacaacggcggcataataggccagccgtgcaggcggaaacaccagtcggcggcggacgaagcggccggtcggtgaagacgtagacgcccaacaacggcggcataataggccagcgagcaggcggaaacaccagtcggcggcggacgaggcggccagtcggtgaagttgtagacgcccaacagcggcggcttaatagaccagccgtgcaggcgaaaacaccagtcggcggcggacgaggcggccggtcggtgaagacgtagacgcccaacaacggtggcataataggccagccgtgcaggcggaaacaccagtcggcggcggacgaggtggccggtcggtgaagacgtggatgcccatgaacggtggtgtgaccaaccaaccgtttaggcgaggacaccagtcggcggcgacggaggcaagccgatggtgatgttctgactgatccattcctggagcgtaagagataagcttaaagccatgaatcccttttatgcatatctggatttggatcctgcagaacaaacatataggatgagtagtatctgatgtaaatacaatactcgagaaaaatgcaagtattttaaaatatttataaatatgtatttctcctcttgtcaattttgatttccccgagcagatgactccatacgtttaaacactctgcccgactagtcatagtccccaagcatcgggagtcggcctaggcatttcccaaacatgcatatgagtgacatgagttcgtcattaatggaacaaagtttcacggatcagaatttactactcgggtacttttgcaattattaagagcagaaaataaatttatctcatctctatgcttttgatttattccgaataatacttagcaccttgcgttattcggtccatccaacgagcccccgggtgctaggaatcggcccaaaggcaactatccattggcaaaccaaacggaaagcataggaagatggaactccataactcgataggcacttttgtactcagattatgtcgcaagcaatcaagatgaatattatggaaattattaaaaagtatgataaaaaaatatgatataacatctgtagcccccgactcactactcaatggaagaccaattggtgtagtgaggcagaggaaaaggaaaaatatcatataaagaataaaataaatgatgacttagctttgtaatattccccttggtgatggcagaagtggccaatgtgggaacaaagtcgtccatcaataacaatgaagacaccagtcggcggcgacgaaggcggtcgacggtgaaagcgaagatgcccactaatggcggcataataggtcagccgtgtaagcggaaacaccagtcgacggcaacgaaggtgagccaacggtgaggatgtagacatccaacaacggcggcataataggccagccgtgtaggcggaggcaccactcggcggcgacggaggcaggccggcggtgaagtcgtagacgcccaacagcggcggcataataggccagccgtgtaggcggaggcaccactcgccggcgacggaggcaggccggcggtgaagtcgtagacgcccaacagcggcggcataataggccagccgtgtaggcggaggcaccactcggcggcgacggaggcaggccggcggtgaagacgtagacgcccaacagcagcggcataataggccagccgtgtaggcggaggatccactcggcggcgacggaggcaggccggcggtgaagacgtagacgcccaacagcagcggcataataggccagccgtgtaggcggaggcaccactcggcggcgacggaggcaggccggcggtgaagtcgtagacgcccagcagcggcggcataataggccagccgtgtaggcggaggcaccactcggcggcgacggaggcaggccggcggtgaagtcgtagacgcccaacagcggcggcataataggccagccgtgtagacggaggcaccactcggcggcgacggaggcaggccggcggtgaagtcgtagacgcccaacagcggcgccataataggtcagccgtgtaggcggaggcaccactcggcggcgacggaggcaggccggcggtgaagtcgtagacgcccaacagcggcgccataataggtcagccgtgtaggcggaggcaccactcggcggcgacggaggcaggccggcggtgaagtcgtagacgcccaacagcggcgccataataggccagccgtgtaggcggaggcaccaatcggcggcgacggaggcaggccggcggtgaagtcgtagacgcccaacagcggcggcataataggccagccgtgtaggcggaggcaccactcggcggcgacggaggcaggccggcggtgaagtcgtagacgcccaacagcggcggcataataggccagccgtgtaggcggaggcaccaatcggcggcgacggaggcaggccggcggtgaagatgacgatgcccatcaacggtggtgtgaccaaccgaccgtataggcggggacaccagtcggcggcgacggaggcaggccggcggtgaagtcgtagacgcccaacagcggcggcataataggccagccgtgtaggcggaggcaccaatcggcggcgacggaggcaggccggcggtgaagtcgtagacgcccaacagcggcggcataataggccagccgtgtaggcggaggcaccactcggcggcggcggaggccagccggcggtgaagtcgtagacgcccaacagcggcggcataataggccagccgtgtagacggaggcaccactcggcggcggcggaggccagccggcggtgaagtcgtagacgcccaacagcggcggcataataggccagccgtgtaggcggaggcaccaatcggcggcgacggaggcaggccggcggtgaagtcgtagacgcccaacagcggcggcataataggcggggacaccagtcggcggcgacggaggcaggccggtggtgaagtcgtagacgcccaacagcggcggcttaataggccagccatgcagacggaaacaccagtcggcaagagtagtgccgcggcgttacatgcaaacagcagaaaataccaagagagattaatctgacatttagagatcaatctaataaacaacaataagttgaaaaggaaaaaacccggcgaagtcggagattaaaaggaaaaaactcgccgagattgatctcttcgactgactccgagacggagcagaggaggcggaggtcgcagtcgcgggcggcgttggtgtccatcagcacgacgcaggacggcaggaaggcatcggcgtggctgcagccgtctcctatgcatccgattagatcggttttggcatgcttcgtgtttgtagatccatcttgcaacaccatggcattctcgttgggtagattggaccagtaggcttggtggtggacgaggacgaccatcaaatccgtcgagctgtcgttgccccgtcgttgccgtcgtgctgatgcgaacaagatcaggcagagaatagcagtgacgattcgtcttgttgaagtcgtcggcggcgaagaatcaaggagctcccaaagcgaagacgaagccggcgactcataaagtttattccatcgcactcgtcgtcaggaaactcggcgtttccccctacctggcgcgccaactgtcgaaacatgatttcggcaataataaaaaggggtagcgcacgagacctaaaagtggatggatgcagagacaaaggatttagacaggttcaggccctctcaatgagaggtaataccctactcctgtttggggatttgaatccaccgggtgtgtattgatctgacgatcaagttgtctcatgccccctagagggcttcctgcccaccttatataggatggggggcaggattacaagatagaaaccttaaccaatacggtataggtttcctaaatctaatttacaatattatcaaaccaggactttaggctgttccgtaatatataaggaaaacgtaatacccgagtcatgatctattacatattccatagatataagttatcccctatgactagtcggataaccatgccgtatgggtatggggtacccataatatccacaatatggcaggtgataaccctcaagattaaatctatcagttcaacttcttgatgacttggactcatgtatgtatttgtttattggaattaatacttgcagttagtgcggtataattatataaaattagaggatttgcggtattattttacactatggaccacaattaatgcgtaaaaaataacatgttgatagttacgcattttaacctttaattaatttggtgtcctctgtggcatgatacaacttccaaaatcaacatgttaaactaagcaataattcttattttaactcagtcatatatatgaaaacaaggttgtttggatccgatgcctatcgtagtatcttacgatactattgatcctaccaagctgaaatgattatgatatcctattatatgtcctactcctttcatcctaaaatatagctatctttagctacaaatttatagttttatcatatcctccaatattgtaggattttatgtaagatccgggtaagtattatttaaagctaatgccaattgacaataatataaataagtccacacaagtttaaagaagtaaattaaatttatcaaaatattgatattataggctatcattttctactgtcctaaaatacaataagttttggtgttgtacataagcattaagaaaataggtgaaatcaaatgggaaatgttatgacttgttaagaaaaggacgcatatgaagaaataaaatgggggagattgtgattaattggttaataaataaatgtaggtgaggacgcttttatatttgacaaattttgaatgctagaaattattatattttgagataaattttgaatactaatagttgctttattttaggaggttgggagtattaaaagttttattaaaaaacatgtagtttagaaaaatccaacagtacatcaatcctacgagatctgattgtacgattaaatattgtgaggaaaatatgatcttacatagtattccgatcttaacaacgatgcatgaggaagggcttctacagtatggtatacaaataagatataagaccttatgactagtcatatagatcatggatattagccataagacattaaataccaaaaatagctataagcttgtgactcatacacaccagagaggcagagggtgaaaatagctatagagcatgatggcatccatcttaaagtaggattttcaccttgatctacactttatgatctatgttttaaagtgggctagagataagcttaatgtttccacttataacactatagtatatgtcattacattgagttcccatattcatatttttttagagaagggtattcttacccggcctctacatccaactggatatatacgggcctctacatccaactggatatatacggccattgaaatagggaacttagccccgcaaataacccaatctgaaattcgctcctacggagatttgaactcaggaccttggggtactactcaggtcactgtaaccactaggctacatgccctttcgtcatagtgatgttaatgaatctagatagatatatatgtctagattcattagcatcaattttgaatgtgaaaaatgccaaaatgacttatattgtgaaacggagggagtatgtagcaagcatatatccctcgatgcccagtcgccgcctgctccgtcggctccgccgtcgccattcttttcgcgtccgagaccacagccgctgtcgctgtcgagtccgcggcgcgttgacgatcgatcgagacactgcatgcagccgccatcgagtctgtggtgtgtgttgacgaccaagcctgcatctcgccaaccatcgcaattctgcaaattaatccagtcgatcgacgccgtagtctctagccggccgcccggccgccgtgatctctggctagctgcacctgtagcccggacagatgccgccccattgcatcgcttttgttctcgatccatccccacatgagcatgacacgggagagaaggctcacttaattacatcctcgacgatctctccggcctccaccccgtcctcccttgccttttgtcgcatcttaattaatttatgctcagtctcgcaggccatgaagacgcaaagcaggacgtacggcccaaatctgttactacctaaaaaatttataatgcttccgtcttccgtcttatcaaaaaaaaaaagagcgatcatggaaaaaaaacgcggcaacggaaaaaaaaaaggaataggaggcggaaaaaaactcccctcccgtctcccgatctgttttttttatcaatttctaaaaaataaataaacaatctaaattcctaatcacaaaaagaaaaggatataatttctaggtacttaaaaatttaaaaaagtttccgtcgtccatatataataaaaaaccattatatggtaaaaggggcggaaaaaaaacacggcaaaaaacatctgatttctattgtttttgtcattcgtatatatctctttatctctaatctaatctaatatatctatctaatctaactactttaaaaaaaagtttccattgtccactaaaaagaaaaaaacacgtgagaaaaaaaaagaaaaacatgccagaaaaataaagcaaaaaaacatgagaaaaaaatgtcaaaaaacacttgagaaaattatgattgctgtcatctgtaaaaaaaaacattgtcagtgtatatatattctctatgtctaatataatctaactactaacttaaaaagagaagtttccattgtttgtttgtgctagaaaaaaggtttccagaaaactcacgagaaaaaaaataaaaaacgctcgagaaaaacaagaaaaaaacccgtgagaaaaaaatgtcagaaaaaaggggcaaaaaagtgcgcaagaaaacaaaaaaaaagcgtgaggaaaattcggttttcattgtcataaaaaaacaagaaaaaaaccgtgagaaaaatatgtcagaaaaaaggggcaaaaaagtgcgcaagaaaacaaacaaaaaaaagcgcgaggaaaattcggttttcgttgtcggtaaaagaaaagcaaaaaaaatgctaggaaaaagctatcagaaagacgccaaaaaaagtccgattatatggtaaaagaacattgtatatatgtgcaattatgatttcatatttagcgttatataaagaaggtgaaatttgtatttcaattaattatatatgtaaatatttcttaatgttccctcaattttctcgtattttttttccgttgcaacgcacggacactttttcttttttgaaaaaaaaggtgcttccattgtccgtcaaaaaaccggacggaaaaaaccgagcgaaaaaaaactgggcaaaaaaagagcccgatcaaaaaaccgggagaaaaaaaatgtccgatccaaaaaaacggagccaaaaaaagggcgaaaaaaaacaaatttgtccgatccaaaaaaatacggggcaaaaaaacagaaaaaatgaaacgaatcggtaaaaaaaggcgaaaaaatttaaaaaactgtccgattccaaagagaaaaaggaataatacgtgacacggtaaaaaaaaatcgaccgggcgaaaaaaaccgagcgaaaaaaccgggaaaaaataaaaaaaaaagtccgataaaaaaacggggcgaaaaaaaaacaaatatgtatgatccaaaaaagccaaaaaaaagaggaaaaaatcgaaatgaatccgactctgtcgacgcggtaaaaaaagggtgaaaagaatataaaaaatgtccgattccaaataaaaaggaattatatgtaacgcggtaaaaaaaaaggaatcctatttatatctagaaaggtccgacactataagaaagtggcgaaaaaaaccgttcgtaaaaacaaatgcactaaaaaaaataaaaagggcggaaaaaagtgcggcggaaaaaagtctaatttctattagtcgttttagtagtccgtttatatctcttctttatctctaatataatataatataactattttaaaagagaagtttctaccgtatattaaaaaagaaaaaaatgcgtgagaaaataaaaacggtttaaaaaaagcgtgaggaaaaaatgtcagagaaaagcgtaaaagaaaacacgatagaaaaaaaaagttccgtagtccgtaaaaaaacacgcgaaaaaaaatttccctcgtctataaaaaagcaaaaaaaaaaaagcatgcgtggaaaaaaactattagaaaaaagcgctaaattgatggacacttggtcggataggatccatcgactttttttccatctgctacacgacttttgtttcgtcatctattctcctgtattagagaccatgcacatcttcgtaggtaaattaacatagtatttttgtgaagtatggctattattcttgataacatattatatgaaataatcttagaaaataaacatattttaattgttatatagagaagagtggacagtgactctattttgtgtagacttgaccatacgaggcaatgtaggatttgattggttgcaagaatgagattaaaagaatattttagattatatgcatgttgtcatatgaataatccaattattttaggtaaagcaaacaattgtaaggttgccatcatcgaggagcaaacatcgtaaggttgccatcatcgaggttgggcaattacatttaagatgttccaatcttctgattttctgattgttatcgatatggttatgcatgaaaaccgtatattatcattacgtttttttcacccgttgcaacgcacgggcatgtttgctagtcaaatgtaaaaatacatggtcgatcttaagtgaaaagtttgagttggtccgtgttgttcattgtgaaacatggttaaaaaagatatttactcttttttaattgtaggtgtgggatccatcttaacgtccattattgaccttaagcattacaacaatggccatacgaatatacgatatggtggaattaacctaccttatttccaccggagtcataaacattgttgttgcctaaataatgttggtgccccagcaatataagcattattatgaaagaaatgacgtggtgtgaaaaaaaatatattttccccatatatagtttcaactgttgatttcagatcacaaattaaaggatatgtatacgcaacaatgaatatcgtgggagatatatagtaaatccttcgaaatgtatgcctcccgaacatggtccacaaaaatttaatttattttgaacatattcaacgaaaaaacatacgtttttaacagctacatatagttaactaattttgcatataacaaacctacaaatcaaactaatcgaggatgaaaaacacaaaggcatgcgtgctatatcttatatattagtgcctatactattgccagaatctcaaggtattgataaggttgaaggcttgaagccaaatcatcgaagcaagctgagaagtgaaagatatgccggcaaattatacggtttaattgcagaatggaataagttcacctgaggtctaactcgtcgacgaatccgattttcgtccttcaaccgaaaaaacagatgcaatgggtctctcaactataccagtgtaatataggtccttgacggtttggacggcggttttagctgacgtggcgcctatgtggctaatttgactcgatgatcttcatctgacgtggtaatgacacggcgcttacgtggcaatttgatttgaaaaataataaaaactatggcccccacatgtcaatttaaaaaaaattaaaatggttggcccacatgtcattctcatcccctcctcttcctcctctctccccatctcccctcttcatctctctccaggcgtcgggtgcggcctctgttgcgccaccgccactgctcgccagcatgacaatgggacgaaggtgaagaatcggagagaacgttgtgtcacgccggcatgcatgtgcgattgcattagctagcttggcgagttgattgaactaactaaatccgtagctaattttgtccgattttcctcggtgcgcgcctggtcgaggcggcgcggccagtgttggagagcagtggtggcggcggaggcgcgccgtcgccgggcgcaagcttcaacaccaacttggttagcatcctagcggtgctcttctagactcttcagttcgccatcgggcacaactcgctggcacggtgcacgcctcagtgagggggccggggcgcggcagcggcgcaagaggagcggagggcggtgtggggtgtggtgtgcggcggtggcatcaagaagcgcgcgctgaggagcatcccggtggaggtgtaccacggcggggaggagctagacggcagagaccgacgtgtgtaccatctgcctcggcgatcaagttcgcggacggcgagaaggtgcgcgtgctgccgcgctgcaatcatgggttccacgtccggtgcgtcgacgcctggctggtctcgcacggctcctgcccgacgtgccgcagcgcaacaggagtcgtcggcggcaacggggccgaggtcgcgcctgaagagagatgaagagaggggagatggggagagaggaggaagaagagtatgggatgagaatgacatgtggtcccatgtggggcccaccatttttttttaaaggggccacagttttttccaatcaaattgacttgtaagctccatgtcaatgccacgtcagatgaagaccgagtcaaattcgccacgtaggcgccacatcagctaaaaccgttgtccaaaccaccaagccaccttatattgcaccggttttgatagttaagggatcgttgtgcctggaaaattggattcgttgacgagttaagggacctcagatgaacttattccttgcagaattacaggtatctcttgatgggccgctattgtactgtttttactaaaggtccaaaatactgtaagaccataagatgggccgggccaaaaccaatactataacgaatttgctacatatttgacctttgactataaagtttaaacattcatcttaatcaaaaatatataattactatttatttttacttgttatattgttgaagctactttaaacgtgacttataattttataatttacactaattttttaataagatgaatatataacttaaacttcatgaaaatcaactgtgttaaatacttatgtcttttcagagggagtaggtatgaaatttaacgcttttagtaaaaaaaaatgtctgttgacaagtagcatgtaccgcctggtgcacatttacgatttaaattaggtccctatcaaattaaacaagattgcaacgaggaaggctggaatttttttttttttacctttccagaatgaacgactagctagctaccggcgccggagtgcaaagggcacatcgctgcctgcccggtggcaaatggtagcgacgcctctgatgactgatgtttatgcatatactccctctatactcgtggaattcggttaggacaacgacacggtctccaaaacataattttaatttcttatttctacaaaaaaatttattgaaaagtgatatatgtatacttttacgaaagtatttttcaagacaaatctatacatataatttttatatttttaaactctaacaacttaagagttattcatgatttatattcctaagatttgacttaaatattatcctaaacaactttctttatgataatggagtagcatatgtgccgcactcgccggccggcgtcatcctgcgtttctagtcaacatgtgccgatgtaacaacaaaaacgccgtcacctttgacatctaggagtaggagtgtgttcaagaatgccacatgtaaattcaactcgggagttaacacggtgaagtagacttctctcgagaccaggcctagagggtagagacaacggcggatcggcctacttagttatattttttaaaaaatgctaagttaaacagttttaactataactattagacaaaattttattacagagcatcgtgatttcacggttttagcagcagaacacgatgcgaagtgcccttttaggaaggcactttgtgaatatagaaattaacttgtggacaccattacccattagaatattaatttttgaataaatagaagtgagaaaccgtatgaaatttctaaaatagcctttgtccaacttgtcagatctcccattacatatctgttacaatttgcgactcttttcatttgaaataacttttttatagtattgttggttaaagtgctatttcaaacactacgtcgaattcaaatatgtttatattttaaggtgaaaggagctccgctttacaatgagtgtatttttttaaaaaaccaaaactgactagtatacagtagtttgagatcatctatatagttgttatgaccctatcgacatgagccatactccctctgtttaaataaatacaatctctcatattaagatataacacatcctacaacaacgattctactccctagcttcgttccattttaagtataaccataagtttccgtgtccaacatttgatcgtttgtcttatttaaaaatttatgaaaaaatttaaaaattaagtcacgcatatagtattattcgtgttttatcatctaataaaaaaatactaatctagaaaaatattcaaacaagacggacagtcaaacgttggacactgaaaccctcaactacgcttaatatgggacaaggggagtaaacatctactacctccgtagcaacctaggatggatgagacttatcctaggactacgaaagttctacaatgggttcataggttgctacattttatgatagagggaatatatcatacttgtacgaagttggttcgtttttttacgaagagagtaactcctaaggacgtttcctactggttaggaacgctctcaccagcataaccaaaaatgatttattctaaagataaaaaatgatttattatatacacacgtagccttaaattttgtccttacggtcactactcgatcatttgcacgaaaagcccggtcattgtcgacgtttgatgtcgcgattctggtatttgtatggtatggggatcgttggtactagggtatacgcaagactgaggtaaaagagatggaggcagggatttttatacaggttcgggcccctaaattgtcaggtaataaccctacatcctgttggccgaagccggtattgctcttattcaccataatcacaccagtacaatatttggggtagcctatctaactgttgtcgacatggcggtctgtagttctgactcgtagtcgataacagggtagtcttcctcctcgagttcgtgcccggcgagatcagagatagtgcaatgtctctcctataagtatccagaaacaccgtaggggactagccgtgcctatccctgaagtcaatatccggcgtcttgtcttggcgtatgttggcttatatgttgttccgtctatggtgggtgttgattgtctgtgtctcctctcctcctagggggccttgtatttatatccataggtgtccccttgtccaagtagaactagggaaactaatatggatacaatccgagtagtccttgtcatttacatgtagaactctggttatccttccttatgcggaactcctatatctgaaggttgtttccgtataggacatggtatgtggtgggttctaccgagatttagtaactactattagatatgtggtatccataaccctgacagtcattaactaatgaaaaaacttaaaagcttaaagtgtccactcggtttcaagcttttaaaattggcacaagtatatttataacatttttttataagcaatcatatctgttgatagcgagatgtactgtagtgactccgtcaactttaaatatgccgattcagttttttagtggtgttcgtaggggtagaatctacgtttagaggtaagtgtgtatacatcggtacttgggagtgcttgtatttgtatcgtgtctctttttttaaagaaaaaaacttaaagcacaagttatagtagaaacgagtactccctatatcgactactttactcaagacactactggctctatctatatctcaactctcgtaatatatcaacattttacatactaattgttatactttggaatgaaggggccagaaagaaaaaaaaaagtagaaataatgtgaaatgggaagacgccgtacacacggcaacttgcttgcttacccagtggattgatcacccgtcgctgtcctgattgcttgctgcggccggcgatcgatccttgcacccatcgagcccttcctcatctcgcaggaaaagcgcccatccaaatatgaggtcatatatactttctctgtcctaaaacacatgctagtacagtaaatctggagggacggaggaagtactgcggtggtcgtatgtcgtcgtcgtcgcatctgaatgatcgatgacgatcacgcgtgtgacagaacgaacgctggatcgatcagcagcagaaagtccggtggtttcagatgtcagtgtttgttactctctctgttttataatgtaagactttctagcattactcatattcatatagatattaatgaatctagacatatatatagtgtttagatttattaacatctatataaatatgagtaatgatagaaagttttatattttgaaacggaggaagtagctctgacttgagttcgtacgtgcagagcagtagcagtaggagtatgtaggatcaagtccactcctccaatacagttcggtctctcgatcgttttcagcaaaagagagaaaagatcctgatcaaggcacgaaaatcttgaagatttggtcgcctcaggacaggtttcagctgtggggtctgactgaccttaactgattgaccggcagcattagcatctctgattttcttcagagtgttcagacaacaaagtccgccatggatggctgcgagaggtacacacaccggtctgtctcatcagcaaatttggtgctcccttctgtctgaaataaagctatttttactttttaaaataaagttattttttcacttatccatgcatctcaactaatcacagttattctcaatttaatctatttatctactctcttttcttaatcaatcacaatttttctctgattattgtttactactttttttatttctatgtgtaacttttgatatacttgtattttgggatgggagtactcctactcctatatccatctttttcttcttgatgtcaccgtgtgtgagctatatacacgtttgcagggagaattagttcttctgatgcattgaacttgaccttgaccttgacctgcatccattatgctgacgatttttgagttcttattggtgcgtatgcacatataggtgccttcagttagcccaaattgcgcagacagatgaataggtggtgagttttaaataatgtgtccaattatctcttgacaagagaaacgtacaggggtcttccggctagcttcacagggtggtgggctagataacctgtgtttgaagtctcaccccttctaattatttaatattaggtcattttctaatattcgtgtcttttttttatttcttcccttttaattatttgatattaggtcgttccttaatattcgtgtctttttttatctcttgacagtataacagagcatgtatagttgcttctgaaagctgtggtcacagaaatgaagctgtccacatcgaatttcttttttaacgaagaacaagaatttgaaaggacaattcgaatcaattgtacaaaagttaccatgtagcatttacctgaaaatagaactacaaatcgaactaactttgacagtagccccatggaaagaagggtaataagttggtgatgaacaattggctaaaatgtttattgatagatcgagatgtttgggctttatagataatggcttttgtgtgtttcgtgttgttgttgtgctacttttaagtcaagttagcaataatttgggctggagatatggtcttcttgatgtttatatgcagacattgcttgagctttagagaagcgtgatcgatgatgggattggtactaaactccgaggaaattaagatctagctagaatgttaagatatattaatttgtggagagacaattaaattatggtttgaggcttgggattatagttcaaaatccaaagtgtgtgataaattggatccacctgtggaattttctcttgttttatgagcttcctatagtaatcctcttgatgcgtgtatgtgactctgtgagaaaggcatccatgagccattcctttttcatgtcatcctttctaagctagagtacacgtttgcagggagaatgggttctgatgcattgaccttgaccttgactgcaaactgcattcttatctgttatttaatcttgatagatgttggcctgtaggctgtagccattagcccaaattgctgacctccacccaccccaccatatgcatagtagcgagttagcaaccatcgatatgatacaatgatctcttcgcagtgcacaggaaataaaaatccagtattccatccgttaaaaattatagctacatagtattcgtaggtcccgttcttttctccaacaagagttggattaagattaagattttcatgacacgcttttcaaacagctaaacgatgtgtttcgtgcgaaaactttctatatgaaagttgctctaaaataccatactaatctatttttttaagtttgtaataattaaaactcaatcaatcatacgttaatactaactcgttttacataaaaaacttcatcttcatcttcatcttcaggagattcaaacactgccgtattgttaaaatacagctatacagtaggttcttatatcttacaacttacgcccccatctcagaataaatgcattcatataatttctctaattcaaatttgaaataaaggaatgcacttttttttagggagaatagctaatatgattcctaaagtttcgctcatggctcattttagtccttaatctttcatattgtctaaacaagtcctttaattttgtcatatgggttgatatagtccttggtcccaccaaaatcgccacatggacatgccatgtgacattcctatgtaaaatctatatgatttgtccaatttaaccttacatatatcataggaaaataaaaaacaaaaggtaaaatgtaagagcaaaaatatacctcaaaagggtgaaaaaaaggataagtatttttttcctatggttatatctaattcacccttatatttatttttctatgatatacgtaaaggtaaattggacaattcatcatagattttgcatgaatgatgacatggcatatccatataatgattttggtggacccaagaactattctacaccttatgacaaagtttaagtatttctttgaaccatttaaaaggttagggactaaactgatcctatagagaaactttagagactaaactagttattatccctttttttaaagatgaatggagtatgttggtacatagaccgtattactcttattattttaatataatcgaagatgtttatgaatgatatatggatctaaatatgttgttacaattaaaattgtcgagctttagaattcgtgaaattctacaaaacctgagcgtgcatataccgcgtaatccgttgctcgaagaacgaaacgctgaccaacttcatataaacggatgggaagtatctaaaaataatgttagaaaatcagcaacttgatcgagggaattagtaaacaaagtaaacatgataatattataagttgggaggttatttaaaactgcacgtacatagcagttgttttcagaacctccctcacgaacggggatataatttccagaaagtcaaacaaatggttaaattcaaaattacaatattgttaactatccttttctacagactgcatgattagggccgaattataaacgtgtaaagaaaagccagcctaactactagtacactaattttcgtgtcacctaacttttgaagtgtttctcattggcaatcagattattttcctctcgagaaaaaaaaaaccacggattctccttgcaagtactcactatgatttttaaatagatgtattttaatttttttacaaatataaaaaataagttatacttggaacatctctaataataaactcattaagtcatgacaaaataaatgataattactattcccttcatcctaaaatatatactagcattcaaattttaccataaaagtaacaaactatgatatgcaaaaagtaacttttgcactaaactaccatactacccttaccatctcttagttttattattactagctaaatgcatgtgctttgctacagataaaataaaatacacaatattttctaaaatagataaaaatatatttctcatacccatctttgttctatagggaatattcaccttaatttgattttatttgtggttatgcatttaggtttgattgatttttaatattaaaaaattcaagggataatgtgcaaaattcacaatgaaaagaggtgaggccggtgacagattcactgccaccaccactatgttgttttatagtagagataggccatgcctacatcccacctatcccgagaaggcaaacatatagcattttttggctaaaatttgctacttggagggagaattttttaataagacgaatgcttaagtgtatattcacgatttaaatgctataaaattggaggcagctgtggtattttaaatcaaagtgtgtatcaaatcgaacaataatgaactcgatgtatacttatctactcgtatcaatatcaaaggcttagagaaatacaatatataataaattgacttcaatcattaacggaggttaagtctgagtcgtcatgtgtgatcgatcgatctcatcttacgtaatgaactttctatagaaatgaaagagttcatttcctctcagcttgagcataattttgtattaactagtgcgtggccggtttcgtgtactttgcgctgcctgttgtttatctctacgtctacggtgtactaattaattgatgacggttgtcagttagacgaattgaaatattgaatcaagcaaacgatcctctcgcggtctcgcctagctaccctgattcgatcatgggctgcacggccttggaatattatataaatgatttaattcattaattgttagattttttttccctctttaaaaaagtaggctttgagatggttgacttgggcgtagtttaggatgtgagcttttgtttataaattattcacatggatgagacggatttactataattattaaaaataatgaatcaaaatattagatagctgataacttaatttttttaaaaaaaagttaaaggaaatatgagatagcaccaaaaattccttgtttttgaataccatttgcttcgatgaaagtgtcttggtatgttctagcttatagaactatctagacatgagtatggatgttgaacaaacgagatgttgtagagcttagcaatttgtcaagtctcttggggtgtgtaacgtatttggtcgcaaccttcatgtggttttgacgggcatgtctcaggctgaagttgactggtacgctaagtcccagcaatatctcttttattcaatattcagcacgacgtaaaatatattgaatggtgtttaattgtgatcatggggcacactgagacttgagtggctattatacgtgcatgaatcccactcatcggaaactatgtggtgatcacaaatgacacttgacaatataattttacaacatcttaaatattctcaaatcatactcatttaagactagttcgcaggataagcactagtcccacactttcatcttaagcaatgatacatagaagaaaatacaactaagacttgagtaagaattttgagcaattgagatgttgtagagcttaaatgatttgagtcaagtctcctggatgtgtaccacatttggtcgacgcttcgtgtggtttgacaggtacgtcttaggatgaagttgactggcatgctgagtcccagcaatatctcctttgcttattattcggtattacggattttatattgaagttgtgatcgtggacacattaagatttgagtggctatttatgcgtgtgtggatcccacatggcttagatgaaaatggaaagctagcaacttcctagggctagctgagcatgagtataacacgttgaattatcgcggtcgaccaaattaaccccctagcttaaatatcagacattttacatccttaactattctttacaccccctcctcctagcactattttgggcagttttgacatgagcttacatccatggtgcaacacgacaatctagacagaaaaaattaaaaaaaaaatcaaagggcccacctattatcagaacctctccctcaaaccaaaccctccacttctctgtctgcacatatatatggctaaagaagaagacaaaccacaacgagctctactatgtcatgtgagggagaagggtgtagtgtgtatcctccgcgagcttgctatcttccgccttccatgtgagaagctatgggatgagggctgttggctctgctgccccaggtccatgctagaggtgacggtggaggtggagcttgctcgaggaggcggtggattgaagcggatcttaggaccgaactgtctgatccccacttcagcagacaataaggacaaatttgtatcaccatcacatgcacgataagaaccccgcaagcctatgtatacagtgaacttggtgtaattagagagcacgacgaggcatatagaccaccttcagtgccgccttcaccacatacctccacgatgaggggacgtttggctcggacaagtcccatatgcatcccataacccgaaccagtggttccataatccccccctcccccatcccagaccccaccccatcagggctgaaggagatgccgctgttgatggagaagaatcctcttgcgttgaaggaggattggagtggcaagtgtgggttagttgcgcgtgtgctagaggacggggtcggaggcggaaggtgggcgatggatggaggtggttgtaggggtaaaaactgtacggaaattttctgaccattccaatacccttttctttttttggcacaactaatataataacaatatctttatcaacggttattgataataaaatttagtttttctaatttctgtcagggccgcattaaagttggcacttaatagttaaatttataaatatgaaaatttcccgaccgttttgtcaacgtttgaggtctcgactacagtatttgtatggtatgaggatcgtcggtaacagggtatatgcgaaattgaggtaaaagagacagatacaaggatttatacaggttcggactccttatctgacaggtaatagccctactgctgttggccaaagtcgatgtttaggccgtaattcgatcgaccgtgatagtccgacagaagtaatttggactactttttccacaccaaaatgcattattcgtcgtgaatcaaccgtcatgcatgatggaaaatgtcgacgagcccgaaagtttaatgctaactggactatgtgtcgacttcccgaccggcggcggcgcttctacttaacaattatgagacctgctggacctggaccgtccagcaccagcagtggcaggccggcaccgatacgtgtacacgtacacatatctacttcagctctatcgtacgcctacacgggcagccggccgggcgatcgactgatcgactagctaccagtttacgtacgacggatgcaataatcatgcagttgcacgtgcctgggcctgtcgccgcagtaggttttgtttgttgaatgaatgtacgacgactagccaccttgtcgtggtagcacgtttgttgaaccagtcgtcgtcttccgttttgtgtttggtggtaaaaaaaaaaaaagaaaagaaaagaaagaaacagaagggatcgattcgatcatcgacgacgacgtgagctggctgggccccgcggagcttggcgttacgttgcgttgcgttgcgttgggtgcgcgaaactgcaaaggcagcggcaggcggcagcagcattgctatcgtacgtttgccgctgttggactgggaagtaattagattcttcgtctcatcatggtaccgataccgggccgtgggttggtcgctgtaggctgtggttgttgtagcgcggcgctcgctgatcgatctcctcgtgcgcgcgtgccgccggattccgcgaccgacggcggtaagcaaactaagctgcggtcaagtctcccgcagccgcatgcgcatgcgcgcgcgcgtgatgagcaagccgacggccgggcgaggcgggcgcgcgcgcgcgaggccatggccgaccgacacgttctggtcgatcggatcgcgcgccgacacgagacggatcgcagtgtttttgctgctacatggtaaaaaaccaatctaataccagatgtgactaatcctactactataaatctggacatacctctattcatatttacatttatatttacagtactagaatatgtcacatccgattctagattcggtttttaaagtggatggagtaaacttgtactactagaaaaatggtttttccaggcaaccaaaaatggtttattcaggtgggaaaggaccgcctgcacgcaaaggcctacgaaaatagatgattttcgcaggcggccatgcaatccgtctgcaaaaatcatttttgtaggcgccatctattttcgtaggcggtagaaccacccgcatgcaaaaatatttttagcgaataaaaaaaaatccgtcgctaccaccccgccggcagtgccgctgacctctccctccggccgatggcggcctcccctcccctcctcgaatccaggcggcggcggcgtagtcatcgtcgtcgtcgtcgcagccgggcgcggaggagtagaactgtgggagaggatagggaggggccctcccctctggtcgcgccaccacctcccctcccctcctctgatgcaggcagcgtcatcgtcggcgttatcgtcgtcccgaccggccatggagggtagagttgagggacaggagagggaggggagccgcacctcccgttcagccgcgccgacgccgatgcccttcccccgccgtcgacccctccgcctgcgccgccgccgatgcccctccaggggagggagccggagggaaatgagagagaggagggtgaggaaaataggtgatggagaggataagatgctggaggagaagataaggataggacttggattttttttctgtagccatgatttttacaggcagattacataaggttccgcctgcaaaaatcatttttttacaggcggacctcttaggtggcccgcctggaaaaattgattttcgcaggcgaacgacgagctttaccctggtttatatttttgtaggtggtcatttggctccaaaagtcatacccgtctgaaaaaacctcacgtgtgtgaaaatgctttttagtgttgtatactccctctagatatatttctattaactcatcccttatataatataactaaaaaattatatccatgcatataatcagcaaatattaagatgactacttaatttagcacatgaagattacaaatatgattatttcatttgaaaaaactaaaaaaataaaacatgcttaaaacttttggatgaagagattgggcaattcaaccaaaaactatctagtactggttttcatattatatagataaacattatatatctagtggatagtttcttaaaaataaattctctcatccaatcacctcttttctctttattttatccacctatatatccctttgtctccatttttgttttatggatagaactgatattttcagtagaaacggtttctttcccttttttttttctctttcttcgttgactctcttgtcatttagtttttttttacgtggcaacatatttaattgtataagaactagctaaagttgaaggttggtactaaccagttcacctttttttcttttataaagcaagatgatttgtaaatgtacgtactctccaagaaaatggatttcgagcactcaagtacgctcgcaatcgttgttttactaggattttgtgaaaagaaaagacaacctacatcactttgttaaatatcacatatatgtttaaaatcaatctatccaagaagataccaaaacaacaaaactactactaagaatattacgttaaagatagatcatcatatagggttgattagagataactattgtttcacccaacggcttaaaagttgtacgtaggccttatgtttccctaacaacaacaacgacaacaacaacaataacaataataataataaaacctccaaaattaactgctgatacgctcccatcaccaccagcgaattacgtcgaaccaacgacagaaaacattgaagtgtaatgaaagtcccaacatcttgaatgtcgccgtcgcaattctgaacattcaaaacaaggttttgacttggagagtctatcccatggcacggatgagcacatagggggaggtcgtataacatcgcctctagggaggtgtgtggcgcacacaggtgtcaacgatgtcggtacttaagcggtcgactagatctataacagattggaggctttatatgccaccgccaccaaatccggttgaagttaacccctgtcaccgatgtagaagcccgccaccacgtccaccactaccatgtgccacctctgggatgtctccagcgctgataccattgagcctccccgtcgatggcaaccgaagtgttgacccacagacaccattgagcctcctcatccactagcgctagtggactcgagggcatcaatggtgtcctagtgtgagtatgcgccgctgccgtcttcattaaggaacattcgaatccgacgctcccttcccgccattgtcgcaagcttagccaaatctcggtggtcgacctcccgatgaccaatgacagtgccgaccacaacacatagcagccccgccgctcccgtttttcttgcagctacatagaatttcggtgttggtgaggcggtagggtggttgaggcaacacggtaggtcggtagctgtgttctgcctatgcctcgatctagatattatggaggttctctattggtgttgttcatgtgtagcgaatgtgctgtgatctagatataacagaagtgctcacttctgttggtgttctacatgtgtagcttaaatttgagccttgtgaattgaatgaacatgtgccgtttatgtttagacctcatgaaaaaaaatgaaggcacactgcctcaaagaagtagtactttctcttctaggtaatacgtcattttactttgaaattcctcttaatttttataagtcgatcaaaaacactttcttttaccttgggaagcaacaatttaacttggtatttgaaaacattccaatatcaagaaacgatagtggaataattaagatccaaagatggcactacatgatgatatggtactaatgatatattgatatcatttgcggaaggtgacgatgtaaacgcgattcacgaagaagatgatgtgtgtgcattgaaaccgcgactacgtatgagtcaagataatgtgacgatgtaaacgcaatttacgaagaagatgatgtgtgtgcattgaaaccgcgactacgtatgagtcacagataatgtgacaaaacatgctgatagatgaaaggaacgatgacacccatagttttggttatttattggattcaagttcacaactatattgatgttatattgatgtgacgacaatttaaataggctttatagatgatcatgtgatataatgagataagtcatatcgtgtacattagttaagaaaattaatcgtgtatatgagttatgaaaattacttcggattatttttaaacgaaaaaaaatatagctttagacgaagtaccacaataagtgttttatagttattttaggatgcatgaagtttttaatgtaaattatttccaatgttttttttgtccgaaggttattttataaaaaaaataccaaagtttgtagagcacaaatttgacaaaatctttaaaagaattaggtttatcgataagttatgaatcagctaatcataaaaaaaaacccctaaaattcatcaatgccgatggactcatcatccttaataacacctgactaaaaatgtcatccagacttaatcatcacatcatcaccgtcatcttctctagcatagcaaaagcactattcactcatcatcatcaaaaagaaagaatcatcatcattaaaaaaagaaaaaaaaaaagggagaactcgatgagatcagcctactacgcgcttccatgaattcgcccatggcccccaccgtggcctttcaagtttcaaccccaaccacccgacgaccacctctcccccccccccgcgctgcggccgccgaaatacccgcagccacccgccgctgacggtcaacccaccttcgatccacccggaacaccatccgcccgtccaccgatccccccctcgccgcatccacgccgtcccttttaatccacccgtctccgtttcccaccccccgcgtcgtgggccccacctgccgcattcccaccaaacctcctccccccgcccccgcctccttcctccctccctccctcgcgtagtcaaacctttccttctactacttctcttcttcttcctcctcttctcctcctctcctcgccgaggacgcatcggaattcaggtggaggcaaggattgcatgagctaaggtgaggtgtgtccggcgtcgcgttcgcgtgcgaggtggtggtggtggtggctgtagtgtggaggtggtggggagtgtgaggagagggaggggatggaggtgggggagagggcggcgatggcgctgggagcggggttcgacctcacgtcggacttcaggctcaagttcgccaaggaagggcggctggtggagctcgacgaggccggggccagggacgtgcccgtgccgggtggcggcgtcggcggcggcgcggcggcggtgctacgcggggtgccgcgcgacgtcggcgtcgacaagggcgaccgcatccgcttccgctccgacgtcctcgagttcaaccaggtacgcccttgccttgcctcccttctgctgcaaccgctccaatcttggttgactctgctctgctcggctcgggctcttgctgctgccgcgtggtgattagttcgcgagattttcttttccggggacacgatcgcgagagatgcgcgtgcctcctttcgtgttttttcgctcgatttcgctgttctactggggttgcgtcgtcacagatgcttggaaaaagattggaggtggcaactctgattaattaaccgtgcagaactcgatcagaccgttgcttcgcttggttgaatgaatcgggacaaggggactgggattacaagcttttacccttgttcttggttacttacagttcaccatttctgtttctaacgagatcttctttgggaagaaggagaagaactctacggacagcgagcagaattggcaaagagtaaagaagccgcggcttgcttccgtgaaacggtcacacaaattgattgactgctaattttatcccatcgcttgacctgtggaaatctcacttgaataagacgtgcaattccgtctaatttaggcacattttgcccaattttttggttcccatccatcaccttaacttccatacctatcagtactttccttcattaatgttaagagaatggtcttcgcctcatgccttgtttgtcagttaagtcgagccacagatttcggcttaaacatgcctgtctggcatcaatcaataaaatcttcacactaaccatttttgaatgttacactatgctggcattctaatggttgtacgtttaagtccttaaatagtggttcttgggtgaacttcagctggctagaattcaatatcatcgaaaattttctcgtggggaaaacgaacacttatttttctttcctgaaatatcctataggattttgaatgctgcagttcgcgattcttgtttctctgtcgaaaaagattctgggatagctaagtgtaaactgttcgagatctttcctgtagagtggatctgtggtcatccctagaaaatctggttggaatcccactcagttttttcatttccagacaggaattgaaacagctgtctctgtacatatgttcacacatatttggggggtttttttattgttgcatttaggaatttatattagcacaaaagaacaaacagtacttcagttattcctccccgaagtttagaaggctagcaagtgatgcataatccgttggcagaagaggctggtccttgtcaaactggtagtactatgtttgtaccttgtcaaaatattgtcgaccttttgaatgtggcttcttcagatgagactagctgcactgtctttctaaagcacgatcgcagcatttcattggaccacatggcctcttaattgtgtagaaccttcttgcttttgaagatgaaaagctgcttttcttgatgcctgtatttaaatacaattaacatggtagacaatggatattcccttcaaggccatgagtagagttaggtgtttttctacatggctttccaaatgtgaagttcagctttcgtgtattagagatatgcttcagctcgatccttctattctgatatgattgcatttgattttcctgacagatgtccgagttacttaatcagaaatcttcagtccaagggaaggtgccttcaggctattttaacactcttttcgatttaagtggagcttggatgacagatgctaaagagactaaacatctagcatttgatggatatttcatctcgttgtacaagttgcacctaaaaacttctccattggttcttcgagatgaagttagaagtgctgttccaccgaaatgggaccctgcagcactatcacggtaaagcactttgacaactgtttttttgggagttctcattttgccaaatatctgtggtttaatcttgggggttagcttcttaagtgcactgtatgtgtatttattggtttgcctacaatatgatttattttgttttagctggctttgagtcacatacttttttttccctggccatatataaaatctatatatgtgaataaaagcagctagatcttgttaattttcaggtttatcaaaacttatgggacacacataattgttgaaatggcagttgggggtcaggatgtcatttgtgttaagcaaagtccttcttcaaccatttcatcagcggacctaaagctacacctggaagatcttggtgatttcctgttttctgatgggaggaatcattccccgatacatcgcaagaccagggatggcaagagcaaggtacaaaatggttctaccctcaattcacgtagcaacctgctggaagcaaacatatctaatccgattcattcaatataggtgcctgatgtttttgtcaggatggaacagcagcctaataacctacatctttctagctactcagaatcatcaaccaaagatgtgagtatttttcttagtttaatgtgtcagttggttctctagccgcgctttgcatactgaaagatcactgctttcccaaacagggcctgacaattacatgctcgaaaagaggtggagatgcctctatagccagccattccaaatggttacaaaccgttccaagggttcctgatgctataatgtttaaatttgttcctatcacctctcttcttaccggcattcctggtagtggttacctcagccatgccattaatttgtatcttcgctgtaagttctcctataaattcccttttctgttccacaaacttcaaatgttagtctgtcattctataattgcttcttccggattgactgcattactaactttcataacctttattctgaatcgaactgcaatttggataaatgaatccttataaagtttgtgctctgtcagataaacctgatcctgaagacttgcaacatttcttggagtttcaagtgcccctacaatgggcgcctttgttcaacgagcttatccttgggcctcaaaagagaaaaggctcctatccttcattgcagttcagatttcttggtcccaaacttcaagttagcacttctcaggtacttgattgttacattgcacaatctttttttttaaaaaaaatttcttctttcagtttacaattcaccgtaacttttgaagcaccattatgtcagtaaacacgcactcgaaggtgcgaactagcagtggtggtgtgtgcatgtgcgtctgccctgtaaatgcaaagaaaaaggaaaacgtaaaactcgaggttcagtctatttacattgttcttgtgttgggtccaggtatctagttctcataagcctgtagtaggcttacggttatacctggaggggaggaagtgcaaccggctggccatccacgtccagcacctgtccagcgcccccagcatgctcggggactcgctgtcgtcgtccatgtcggagtggcgcgagtcggaggaggtgggcgccgggtacatcgagcccatccagtggaagagctactcctgcgtctgcacgtccaaggtggactacaacccggagtggctcaagcgcgtccccggcggccgcggcgtgttcgtcgtcaccggcgcgcagctggtgaccaaggggacgtggtcgaggaaggtgctccacctccggctgcactacacgcacgtccccgggtgcgccatccagcgcacggagtgggcggcggcgcccgcggcgtcgcagcgggggagcttcctgacgacgatcagcacgacgctgagctcgccgttcacgcagctgcaggccgccgccgcgccggcggcgccgccgaggaacgagccggcgcccgcggcgctgctcaactccggcgtgtacccggacggtccgcccgtgccgctccagtcgaggaagctgctcaagttcgtcgacatgtcggaggtggtgaagggcccccacgacgtgccggggcactggctggtcaccgccgccaagctcgtcaaggacggcggcaagatcgggctcaacgtcaagttcgcgctgctcaactacgacggcacgcagccggcgacggcgacgatggccggtggtgatcaagggcatgggctgctgaattgagattttcgccgtttgtttgtacatatcacagcagttcatcacagctttgctggtctttgttaggtttcatcgatcaggattttggtttgggacttgggagcagataggattaagagaatgaatttgttacagatttttttttactttttgggcgtataggaagtgtatagaacaggagatccaggacatacaaacaaaaaaaaccatcgagcagtgtgttggcaatgctccaatttattttcttttcttgctgtgtaattagagtcttttgcgtgtaaattattatgagttttgtttgcctgtagattggccggccaaataagccgatatcagaacgtccaaacgggtcaacgggtcgcgaagtgaatatgttaaatctaggccaacaagtaaaagtgaatatttctcacagtgttcatgtttattaagcgaaatgagtgtaacttaactggtcagatttcttgtgatgaaaccagctcacccgggttctaaacttaacacaagtacttgtatttatggctaataaatgtttcagtgatagacagcatatgatagcacggcgtctatggtgcctgtggtgactttacgttgccggctcagccttgggtagggtgtgtattcttaggggcgagcgtttgcgtttgtaatgagtttctaatgaaaatataagatcatttttccaacatatgggtaaacaaacatctaagaaaatttaggattcctttaggatagggaaaattttcagaaaaaagtactaaatttaattcaattcctctaaaattccgagaattgccatctccatacactacgtgtgaattcccttgtgtactcttcaacttaacagctctaaccaaatttaaattttaacacttaattttaaaattgatgttgatatcttatttaatccaactttattttccaacaaagtcactaggaacatttctatttttaggtcgttaataagagtttcgttttataatcaacaaaatgatgatacttgatatatttaattttccaaaatctatggaaattaaggactccttggtatagggaattttttccccaaattttcacacaaaaaaaatcctctaaaatctccggttcaaaagagacctcatgtccggccaaatagatggagcgaagtcgtctgatcatctccgtccactaacgcgcgaatctagacttgtccttccagaaaccttttccgttgtgcccagctgtctccgttccatctgcccaagctgacgcaatttaaatttactccctaaaatctaaataaaacccgagcactaaaatattttaaaaatcccataagaaaactgaatttaaaaatgctttattggcaccgttaaacatggcatctcccggattctatcctcgcagccgcgcgcactccctccctccctccctcaccgtccaattccatccgctcctcctcctcctcctcctcgccgtcgccatggccgccgcggtggcggcctcctcctcctcctcctccagcagctgcgccgccgtcggcgtagccaccgcctcccacccccaccgccaccgccaggcccgcttcgtcgtctcccctcccgcgccggcctcccccgcggcgctgctctggcggcggccgcggcgggtggctccgaccacgttctgctccgcgccgtcgctcggccgcgtcgggtggccgcggcgggagggtgccgcctggctgctgtcgttccgcgccggcccggtttcttccccgtcgtcggcggcggcgggcgatccttcccaggcgctctccgcgctgctcccgctcgtcgtcgccgccaccgccgtcgccgcgctcggcaaccccgctaccttctcatggtgagtgggagatagtcaagtcaagccaaaccccctggacactttcacgaatgttcttagcttggaatcttggggcaactagcacatggtcagctttaactaattcgatataaattatcactttggtagggtctccaaggagtactacgcgcctgcacttggcggcatcatgctctccattggcatcaaattatccatcgacgacttcgcgttggcattcaagaggtttacttgcattctactatactatccatctcaagatcactaacttgattgtgtacagcaggaatatgtatgcatcagtttgtctgaatgtttctttctttgtgtgtgctgcattatgcaggccggtgcctctgacgatcggctatatggcgcagtacattgtgaagccgctgatgggcgtgctgatcgcgagggccttcgggatgccgtcggcgttctttgcaggctttgttcttacttgctgcgtctccggcgcgcagctgtcgagctatgctagcttcctgagcaaaggggatgttgcattgagcattctgttgacaagctgctcgacgatatcttcggtggttgtgacacctgttctcactggactgctgattggttctgtggttcctgttgatgggatcgcgatggcgaaatccattttgcaggtaatgatatgcgttcttgcttggctgcttagtgatgaaaccattcattttgtggtatatattttcttgttaccctgtcactgtgtgctaatgctactctgcaatttcccatttgccaggtggttcttgttcctgtcacactaggtcttcttctgaatacatatgcaaaagcagtcgttaatgtcattcaaccagtaatgccatttgttgctatgttgtgcacatcgctttgtattggaagccctcttgctatcaacaggagcaagatcttatcttcagaaggattcctgttacttctccccatagtgactttccacattgctgccttcattgtgggttactggatttccaagttgcctatgttgaggtagttctataatactgaaatcttatttttacttgttatcaatgtctgtcttgtatcactaacttaaaacaaaatggtggaatttgttatgcatacacaacttcatatcccctatctttttgggcctcatgccttatgaagttctggtccttccttgatggtacagtattgtttaccaaaattattattccatcgacctgaactattttgaagaagtgagcatcttttgttttgcgaaccataatgatcaaaactgagcatattttccagaaatgtataattttgccccaccattttcctaaaaccatggcatcgactcactttaatcactttcctgatttatggccagttatatatagcatttgggtaactttatcttcttagtggtaagctgaactaacatcacatgaccactagttgcttttcttacattgcattctgtaattggcaactaaatccagaattcttgcagacaagtatactttggaaccgccttcatgactgttcttttgaaattcttttacattggtactcaggcaagaagagcccgtttgcagaactatttctgtatgtaccggcatgcagagctccaccctcgctggacttcttgctacacaatttcttggaagtagccaggcagttcctgcagcatgctcagttgttatcatggccatatttggtttgactctagcatcatactggggaaatggtttgcgaatcagagatatcggttcgagatttgttccacaagcttccgcaggtgtgagctcatgataaagcttttggggtgcagcatttagattcgttcatgggctcccccgtcaagttccagaattcctgagcaattggaggctgtagtacacagaagatgccgtgctcttgctgtgtaaatcctccattagcaacaagagatcaggaactgcaagctgtgcatttttgaagataaccagcaataagaacagccttacttagatcgaaggatgctgggatggcacagcagtcaaattataccttagtaccatacaatatactgtagatttcaggtaatgcatcctcaactcatagaatgtagatattagatactgcacgccctcggcatttttatacttggtacaaaaatattatgtatgtcgaatatcattgctcgccattcctatcaagatcaaccgcgtagtacccttttgtgctgcttgttatttttgctccagtatttgtcaaaaagaaattctggtgtttattgcttcatattaagtaatgacttatgaaaaaacccacctaacaaattgggggtaaatatagatgaaaacgttaaacagcactgctgctaccagttctcattcttgtgcaaaataaacctgaaaagtttcacatatatctattttatttctggctggacaaaaccaaaagtttcatatacattttattctggtgaaaagaaaataaaataaaaaggagagataagtacattttgttctgttcctgaaaatatctgactattaatgtttggcatttctgtcaagaacaagaaacatacgagtgagacatgaagccttatttcccttttgttcttgcatgaattgcctgtccacaggatactatgcggtgtacctagcaagcagagtcgcactctgcagtgttctcagttgtgagtgccacaaggttgcgggcagagtccaattacgattggccgatttgattgccattctacatctagaagatgtcacagttgtttcacatggatctctttctctggtccatttctttgtcgtttttggtacacatgagcagtccatttcttcagtttgtcgctgcatgtagccatgtagatcgcgtgggtagtgacagcaacggccagaaaggaagatttgagatatttttcagctgtcttgtagaatttgtaggatctcatgataaccttcaataaagagtatttcttccatgttatttaggatattgatatggtctccaatgcatgatttttaaaatagcgggatactaaggaatgctattttggatattgacatatagtctccaacacaagattttaaaattgtgggataggagcttagtattaatgctattaagagaaaagcaacataatgctgtctaaaattcaattttgggacagctgatctatgcatcgatctctccattccattccataatctatgctactttaaatatcgataatggtggtatccttttccctaacatgtgggctcataaagtgggtagcgttggtgtttcatcaagatgcagtgcctctggctctagctaaaccagtggctttcaaaaaccgatggcaaaaaatgatttgataggtatacaatcttaggctttaaaatgaactagcctataaattcacgcattcacgtgactttgaccatcctactatataatgtaaaaaatacaaaatctatcatttttctatctcgttagataataaccccagaaaggagaaatgaagtctatcaaactttctctctgttttataaactcaagttccagcaaatttaataaagtctatataatctaaaatatatagcttcgctcaagagaggtaactgataattcatatcacaacttaagcctttgaattgaacatgactacatttcattaagatgtggcaatgcagccaattattttgatcggaagaaacagaatcatttcaggttacccagccgtatgcatgttgcttacttcacctcttggatttcagcccgaacccccagccgaacatcttcaacctaatgaatggggaagggctccatgaaatgcaaaagataggagaaacaaagcagggactcgcataattcggtgctgtcttaacaagcacagcattttcaggttttcttgatgcatataaaaaaaagtacaaactagagaaggcctcacaggcttcctgattcacacccacaaacacacaaactccacgactcatgaaattaacttgcccacatggtgtagcatgtccagtgcacatagtttgcacgcagaattatgaaacagcaacaacacacatgacctaaacttatcaaactctgccaacaaaaagtatgaagggaaatgcgcaaaaaatataagatacatgaaatgaaacacaaacaacaatagaaaccaatccatcattcagctcataagtggtcatgcccccttagaactggttggttttgatttagagcaagctggtcacgcaggttcttcattagttcctcgttgtggtcacccatgagcataacttctttcaggcttggaagagatgacacaccaaaaaacccattgttgtctatgtgcatgcaattatttatctgcagcaactcaagccttggcatcgctccttgcaagaagtttaatgatttgaggccttcttgatctttaagctccatcactacaaggcttgggaaagtgccctgctgaaaatcgaaaagtatttttttgctctgaagaaaagaattcttccacagtcgtagaatgaccaaatgtggtagcttcccaaggatttccatggaaggagccaacttcaactgggtgctcctaagcttcaacttagccaaattctggagttgggtgatccatattggtagtgtaactagatttccataaatcttgagactttgaagcttacttggaggtgcaaatgtgtgatccaaacaaccttgtaaacctggttccccctctgcttgcaatgataatgagtgtaagagggcaaggtttgcaatggcagataggatagcttggctatttttcttattgacacccgtcaatcctaacttatgtagttttttaagtttttcaagctcacgcaatatgactttcccggctgcaacgttaacaacaccaagtgtgtgcaggtcattcagttggccaatcccttcaggtgctttaacaccatacatatcaagtccctgtggaatgccaggtaacaagaccttgcaatatttgtggaatatgtcatgcttatttacattgtcattattttgcattgtttttgtgatatatgcttttgtcgtgtccaataccgtcatgccaaattgaactgatttgacttcaacatctggtatttccaaatcattaattggctcgtgctccattttcgaaagatcacttgattctttcaactctatagaagaggtggcatcatcctttggtacatggccggcacgaaggtagtggagcttctttagcttggtgatggtctttggtagcttgatgatacttgtgccactgacatctaacatctggatgtcccacaagttgcccaatgaatttggtagatgatagatatcagtgcatcctctcaatgaaaggtacctaaggtgaagaaaattgccaatttgactcaggtcacgatctttcaaaccagatgtgccctccaaatcaagaatccgaagcatcctcatcatgctaaaatctaaagatgctctgcactctccaaatatagtcactgatcgtacatgggttaggtcaacacacttcaatgcgttcttgtttgtctcaccagtgttgattatagataaatgtcgtactgtaccttcattattagagctaacttcaagtacaaagccatgattttcttccatggattttgaaacactaatcttgtgcataagattatgtactcgacaatattcaatattgccaacattgtgagctggtactggttctgatggttgaatgatgcttctattgataagctctgcaaaatagctctcaccaacttcttctgcactcaagctatgagtcttacttatgtaaccttctgcaacccaacgtcttactatgcgtttgcgcctaatattatggcctttgggaaaaacagataagtacagaaggcataactttagatgataggacaagttattataggatggttcaagggttgtacttatcatttcaagattttctttgttcactgacccagaagtaaaattatcattcaacttcttccattctgtagttgttttttgctttcttgccaagaaaccagcaatattggttattgcaagaggatgaccatcacactcctttatgatgagttttgcttgagtaatcatgtcaagatccaaatcaatatttgaactatctacaaatacctacagttgttatgagaagattatcaacatgtgcacaaatataaggtggatgaggtagattgtttcttaaaaaaaaactaatgacaaaagagttgctacagaaagagaacatgatgaaatatcccaaaccaaatttcaagaggttctcataaaaatgctcagactagtattggcacacattgacaaaagacgacatcaatgctcataaaccacattgaatactcaaatagtatagtgagatctccatatataactttgatagttaactggaaaaagttaagacttcgagtactatatgaaggaatcttaaccaaaaaacttaatatccacagtttacaaagtgattttaatcacgagtactcctgatcattttctcttggtcacttagcaattattttttgtagataattaacatttaattacctatatgatgaacatttaatgctcagaagtttgattgccaagcataaaaaaaaattctttttaggactagaggaataccttgttcttgaagagtgcaaatgccgcatcttctttaagaccttctagcttatatatgtttttgcatgtcatcgagcaatgctcagcaatacttgcttctctcgtggtgtgtaacgctccgcttttcgtgagacgttaaaaactaatttggcaaaatcctaattgcgaaatttcgttctttgagtgttgagtctaagttgtgccaaagatctcaatttaaatccctcccttgtctcgataccctgttatcaaagatcgtctcctcaaaattaccatcccaatgtagtcccgaagctcgattccttctattcgaaatcccctcctggaaccccatccgtgaactttgttgaatgcccgaaccctaactccgtccaaggattcaccttcgcgtcataagctctctccttggttccttcaaaccgattcttaaattcaaattcaacctctcaggttttgattcatctatctttctctctgtattggttcatcaatctacccttgttttctttctcgaacttctgacccaagtctgaatatgcaaatcgagatcacttccacccttgaactctaaatcccaagattcaatccctttcgccttgagttctccccaaaatgatttccgttccgaaataatctcgaagtccgaacccttctattcatacttctctccaaaatccttacccacatatctcgttgagtagtcaaactcaaactcccaagttacactctctttctctaaattatccatccccttttgactcgtctccgaatattgttcccttccttgactcctccccctcatccatattcctcttccaattcaagtctccaaatcaaaaaccccaattcgaatccactccaaattagtcttccctgtaaaagtctattttgcctcctccatgtttttggatgggccggatccactccccagcccatctctctcctttgccatctccctcacgtgcgctgcacgagccgtcgccgagagaaggatctctctctctctctctctctcgttttctcgctccctctctgtttctctctcgcgccgacaccgcttcccgccgtcgccgcccaaaacctccaccgccttcgcccattcccgcgcgcgcctcgcgaggtggccgaccggccggtcgccgccgacgccatgcgctgccgccttgcccccgctccatgccaaaccgaccgccgccgtcatcgtcgacgttatccatggccccccgccactccacgccgcacccgtccaagagtgggagaagcagctgctctccctctcctcctcctcctcctcactctccctctcctcattatggcaagggaccaagcccctttttccccttctttttccctttcccgaccactaccggtgtcactgcctctgcgccgcttgaccgaccgcgccaactcgctctccttgaccgcgccagcccgcgctcccgcggttcgatttccaccgctcgatccaccgccttcgccgcccaacacatccacaccgtcgccgctttcgcaccgcccacgaaaccgccgctaccgccagccgagcacttgaccgccaaggtcagttctcccctccccaaaccgacctctcctccgctataaaaccaagccaccccaaaccccttcctctctcgttttcactcgcctcagtcctcacacccaccgcgccattgccgccgaaccaccgtcgccgccttgttgctgctcgtcccgctctcgccgttgccgtccgttgccgagcaccggaggagctggtgcgtgcgtggacgcgtgacgaggagctccgggcaccacctctccctcccttcttccctggccgcgccctctcggtgccgtgccgcctcggcgtcgcgaccacctcgccgcgacaccgaccgcgccgccaacgctgcttcctcttcgttggtgagctccccaccataatcctcctcctgccgcgcgatgcgccgcgcccgccgctgctcgccatagctcgccacgcgctcttgctctgtcccggaggccgcctctcgtcgatagcccttctcggtgtctcccgtccaatccgaccccgggaacgagttccccgagtcctagagatgctcccgcccctccgaatcaaactcccgttgccccggtgagttttccccttttctccgccggcgatggccgccgccgcaatccgccgctgtcggcccttctcccgccgattccttgcgccgcgaccctccccgtgttcccttgaaccttccagtccgccgccccagccgccgcccttcccttttgctcccgcgctgtgccgccctttccgccgccgcacagcgccgccacaagtcaagacgcggcgaccattgggccccgagccacttcgcctcgcgtcgcactcgcgtaccggttcggctaagcctcatcccgcgctccctcctccctcctcgcgctcgaccgcatcgaacatccggcgagcttcgccgccgccgccggccgccttcgcaccttccccctccgatccgagccgcggaatgggttccctgccccctcctcttcccgtcggtgctagccgccctctccggctcgccgccgttcgccggcgcctctcggccgccgtgagccgtccgatctcgggcgagctccctctctccctctctcccgttcccgccagcgtggcatacacttggacgccacctcaaccgccggccctagcttgaccaggtcaagcggacgccacctcagccgcccatcggccaccctcctcctccgcctgataagacaaaaaaaaagtccatctttcctccctccctaaacacagtgagcaaaagtctatatctgctccctcccaattcacctctctctcaccatatgttggccccacatgaacaaaagtccatttgaaccctctccttgaacagtacacccttggccccgctcgtcagtgactgtcaataatattctagtgaatattatttctataaattccataaaccatttctcgtattccagaaaattccgataaatcatttccttgtcaagaaattccaattaaacttctaaaattcatatctctcgatccgtaactccgattgactccgttcagcttccagtatttccgtaaaattgagatatatctaatggcactattaattagtctaaataggatctttattttgggtcttgtgtaggtttttaattgtttgcgtatagttgcggttaccggattttcgtcgatcgcgggttttcttgaaaattcgtgaagcttcgtgaagaccttgagcaaggcaagtcaccctttgatcaattgcccctataactgaaaagtcattattattttgtttgcaacttgcattattagaatcacacacttaacttgcttggcctcggtttgcgtgctaaaccgacggacctacccagtagtcgcactaattgctgtaggttgtactaccctgatttccttgtcgctccacctttgtggtacctcggtatccgtgctctctgagcgcgtataccaaatatcccacatacaccgttgtttgtcgaaaacttgagaaatgggtttgagaagccttgaaaacccgacatgtggcgtcggtgtgttggaaaataaaatggattgtgaaaactcgcgatgcgggggttgtgcctgtgtggcactgtcccgtattcgcatataaggaccgattcccgtggaaaattcatccgagcatagaacaagtacgaccacatgggtggaatgggacacccctggctgagtaactagcttatcaggggagccttgatgccgagagacatgtggattcaccggggtggtgtcggggaggacccctgggcttcctggcacagtatggtctgggacctaatctggtgttggtttgggacccctcttgttggcatatggtgaacctgtgtcggctttcgaaatgccttgtcatgaaagcttggaggtctcccgacgtggctgatccccacgggctgggtgatccgggttagtaatgtcgtgtgggtaaagtgtaccccctctgcagaggttaactaactgttcgaacagccgtgcccgcggtcatgggcggatgtgaggtgtttcctgtagcgtagatttgtttgcctgtgctttgtgaaaagttgttgtggtgtgggaatcgttaccagaatcagcctatgtggcagatggatgacctgagtggtcaagaaacgaatctgtgtgattcgggatgtctatgggcatcatagtctaggcttcccgagtggagcggattgttgtgctactgggcagctggactctgggagtccgagaaaatgaaaaaggctctgggagccgattaatcaagtggaatggctcagggagccgagaagtaatgatctgacccgggaggtcggtacattaccaaatgagctgttgaaaaacatctcttaaagtcgaatcgagacgcaagtctcttttcggcccaaacttagaaagaaataagtcacttagtgatttcaaaatgtcttcaaataaaagatttgcaaaacaaccttgcctctcttccaagcttgcattaaacacctaaattcccgtgacttgctgagtacaaaagtactcacctttgctctatataaatatatatatagttcctccgcccggaagttgaagataaagtaaagtgaagattagggtttcgccctggttcccagccgtcgcctatggtgttgggtgttagaccgttggttccgctgctgctgctgttgttggtgttcgcctcgtccgtgtcgtcggttgtattctcgggctgtctgagctacaacctaagttaaggtaaataagtcctctatttattttaaggattgctatgattcatatttgttaccgtgggtaccagcactatgtcctgggactggtaccgagatcgcggtttcgtaggaagcggttcgcgccgttttcccctacgacacgctcctgtcaggtgccattgtacggcggtaccagattggggtgtgacatggtgactatgatctttgtgtttgtttcattaggaaaatgaggttgtatcaagttccattcttcaatagataatacatcatcaaggacaaggaggcatctcctctttgaatgcttgattgattcttcactcttctgcaagccatttccaagaacactaaaatcgtgtgcatttaattcatgggctaagctcgtaatgaaatcatgaaggttaaaaggatgcgatatagtgacccaggcacactgctcaaacatgctagttatttcttcgcttccataggcactcctaatgaaggaggttttgccaataccaatcattccccatatggagataatgttctgttctgagaaacaagttggatgagatgagatttttccatttctcgttcgatgtgtggagcattcctaaatgcaggtcctgttggtgctgagattgacttgaaaaaaagaaatagcatgattacgagaagcacatacaatgtggcaggggaattatatttatagtgcttcatctaacctctttattaaagataagtgtatcaaaataataatgattaattattttttaaaaataatgtaatctacttgtttcaaattacttttgttctaggactcaaattttttactcctagcaaattaattgccattctcatattataaaacacttttagtgattaacttccctcccaaccctttattatataaggccctgtttgattcagctcaggattattataatctagattattaggagtaaactgaaacaaacagatagcttattatgttaggttattataatctataagctagattactataatctggtaatccactcttaagatgctttttttagattgttgggtagctaacagctaataatacagagaaataaatagctaacaactttttctatgttggcttattataatccagcttataataatctggctcaataatctagattacaataattttaaagctgaaacaaacatgcctaatgcaaccacacacattaatacatccaccacagttctcattggctattctcaactaattggagataatgtagtgctttaaaaattaattggatgtactttaatgagggaaaacttaatttgtcatagcttcttggctattaagagtaatataattttataaataaatcatcttattaacgttttgaacaagagcccttggtttaacctatttttaaatctagacttttattagaccattccatctttgtggcagttcactgccacaggatcatcaatcacagatatgggatgcccacgtatttggatctgcgcatctatgatgtggacttatatcacaaacatgaaacataagcctccaggatgtggaccatcaaagacacggtcttccaatccgcgtctgtgatttttgcaataatcacttattttccatactcgttcatagcattacacaacacagacatttgcttatatataggtagtccccattagcaatgttcatatacatggatttccacaacggactgtgacctttgctggaatcacagcctccttttttatcatccatgtctacgattagagcaaagatcacatgcattgttttccttctacatgtccatgtcgatgataagagatgcggatgtatcaagcatttgtgaaacatgtcagagacactttttaggtcttatcttttcgcttatgctcatacttatcagctaaaaattaatttttcaaccttgaatttggagttaattttgaggttttttattgaagtttattttttagcctttgcttttagatctctaagaacacgtatataaaatttttatttataaattatttttcatttgtaaatatgacatttcacttattctccgaataagcgaaacgatgggtgcgtttatttaaacgggtctatcgtaaatcacaaatgtgtgctaacgtctgtgccatatcataaatgcgtgttccttgttgtaatctgtgatgaaggccgcagagatccggccttgacccggtgagttatgccttgacccggtgagttaggccttgtttagtatcaaaaaattttgcccaaaaatatcacatcgaatctttggatacatgcatgtagcattaaatatagataaaaatactaattgcacagtttgtatggaaatcacgagacaaatcttttgagcctaattagtccatgattagccataagtgctacagtaacccacatgtgctaatgatggattaattaggtctcgcggtttctagccgagttatgaaattagtttattcatttgtgttcaaaaacttcttctgacatccaatcaaacatctgatatgacaccgaaaattttcttttcgcgaactaaacacactcttgttatggtactcaatgcatctgcgatgtgatcttatggaggcatacagtttttgtctgttatattaagggccggtttagttggcaaaaaattttgcacctgcatgtcacatcggatatatggacacatatttaaagtattaaacatactctaataacaaaacaaattacagattccgccaggaaactgtgagatgaatttattaagcctcattaatctgtcattagcaaatatttactttagcaccacattgtcaaatcatgtcgcaattaggcttaaaagattcgtctcgcaatttcctgacgaactgtgtaattggttttttttgtctacatttaatactctatgcatgtgtccaaatatttgatgtgacaacgtgaaaaattttgtttaggaactaagcatgccctaattggttggctttttggtatattgtgtggtagtggttggcatatcaaaataccactgcctcatagccacgggttaaaaactatgtctaattagcaaacttctcccttcattccaaaataaattaacttatgtatatgaatttgagcatagactatatccagatttagatttatgtaaaaaattgattttttcatttttttaggcatagtacgtactactatgataatatagatggatatgaaaatttttcctttccattgcaataattgccattattaaaatttaaattgtaatagttgatgttttacctcatacgaggaaagtgaatattaagggtaaatttaaatagtgcgcctgcacttatttagttctatagggcgatgccagccatgcttaagggaactacaattacatgatctattttgctatctaagtcatgcatgtcattttttttcttcttatagaattttctcttaaaatgtttattcgattacactgttatattcattacactaaaatctttatatacaagatctcatataattatattctgataaaaatatatgtattttttaaattacttttatcatatatgtaaattagttttagatttgattaaattatgtttataacatctatgaaagtaaattccataaagccctaaagtaatttacataaatcataaaagtaacttagcacaaaatggaagtaagttgtcacggcattagaagtaaatccattgtatggatattaacatgagtctatctaggaattaaagttaattagcacaaattatagaattgactaaaaccaacaatgaaatacacaactcacaatattatgaatatataagaagtaatttaatcaaatctaaaagtattttacatatatgatgataaaaataatttatgtaaatatgcataggggcgaaaacggaacggctccgaatccatccaaaacgagaatatggtatgggcttttagaaatccagcagatatacatgtggatgcatatagtattatgcagatgcagatatagtatcactaaaatccgacggatgtggataatctgattgaccgtttaccgaataattcgaaactatcaacacatgtaaccactctatctattacacataacataagttggtccaagggcagacctagggcccgggcacgctgggtcacggcccggttcctggtccaattagcaatagaccccattttatttttaccctaagggggtgtttagacccaggggtgtaaagttttggcgtgtcacatcagataatatatagagtatcgcatgcggtgtttgggcactgataaaaaaaattacagaatccataagtaaatcgcgagacaaatttattaagcctaattaattcatcattagcaaatgtttactgtagcaccacattatcaaatcatagagcaattaggcttaaaagattcgtctcgcaaattagtctcaatctgtgcaattagttattttttagcatatatttaatacttcatgcaagtgttcaaatgttcgatgtgacatgatgtaaaattttaaggtgggatctaaacagggcctgaaaatcttggcccatcaaatatgtcctaaggcccagctgtgaagtcgctactcgctgaattttttttatttttaattttttttattaaaagttttataaaaataatttttcattttgaaaattgacagaagtggtcgcctaccgccctctgggagggcgatttttaaaaatcgccatcccagagggcggcgaaagtgacgtggcagacggccgttcgctctcgggcgacggccgtcaacaaaatttgcaggcggcccccttgccgccctccgctagggcgattttgtactgtgcggggggccgcctgcaaatgggcggcgggggcctggaattttgcaggcggcccccttgccgccctgggggagggcgattttatactgtgctttatatttttgtataaatatcaatagttatcaaatctttttatattgaaaactatacaagattaaaatctccaagactggtaaaatacaattttattattttttagggcctatttggaatgttaccgtacaaatattttgttagtgccaaaatataagcaagttttggcactaccaaatatttggtaaggtaaaattgcatttgatcatatttggtttgctgccaaaatgtaaaattgtagtgaagaatgttctacagaatctcaaatctagattacgtattaccaatgaataggcttcaatcgaaatcaaacacaagtactattcaaattaccaaaatattggtagggcatgtttttggtagcaatccaaataggcccttagtcttacgcatacaaaaaatcaccaccataattaaacattgtaatgataagatagataagaagtgccatcgatacacggtacaaatttgtcgatcccgacgaatcaagcatgcggtaacctatcggccccttctaggtcggtcagaatgcattgcattctcgtggtccttcaatcgttgatactctacttgtgtttctgactctgttatcttctggccatgatatgatggagtgacattgtcgatccatcgagtaaatccacccatccttggattgccctgtaaaaatagtaatgttattcagtttgggtagtaattttgtgcaaatcatagcggattttgtaaatggttagacatacaacgaaatcgttgtttacattggggcagacaaaatatctccttcaaaatgtttgttcagcaaaggatgtagccacctgccagtgatatctgcacccacactttggacgctcggaccatttaggtaaccctaatggattgttcctccagtctaagcttgcaatttccacccgacgttcgtactccatccaagcatgaatgaactgtatggtcggttcaggttgcgttatcggcccgccacttgaagtaactctgactgtgtcaatccattgtacgaattgacatttccttacatcctcctatgtacatccattttgggatagttaagttaatgatagtactgaggagtgatgaaaagaatagttgtaattaccacgaaatcatcgtcgacaatgtttggacacacgaaacacctttgtcctcgagttcggtgccttacggaccttatgacctgacaacggtcaccacaacgacactccggacgctcacgccacgtggggagtcctaggggatttacgtgccattctaaagcctcagcagcaattcgacgttcatgctcatccttccgccttaggtagtccgatcttgtttcactacgtgggtaagcacgggttccgtcgttttgtgggttctccatgtctacccactcgatgaagttgcacattggacgatatgtctgcgtaagatgttacaattgtgtacgaagaagttagtttttttatccatttgaacttcgaatagatgaagcatacctgatcaaagttcgcgcattggaagaatctcctgccccgagtttgtatcatgagggaagacttgagtatgcatccatccccataatcgcacaaaggacggtcacaccatggtggaaaccaaccagcaaaaggatcgcttcgccagttgagacgctcaaggaatggcgcttctattttcgtgtgttgtgtgctagtgggaaagaagatatgaagaggttgccttcagattgtcaattatatagcgtcgttttcactgcaatatatgtgaactcaatgagatacattattcattagatgtgacaccatacggaatatttctgaacaaacaaaagtgtcaccatacggaatatttctgattacaacaataactgcagttacacgatatgagtacttagtccgaacactcatcacgataacattatgatacaacaccgaatagttcgcaatactactagtacaacaatagtcggaggtactcattacaacaacattcaattgaaattacacgatagaagtatttagtccgaacactcatcacatcacaatagcattttatttcctaaatcgatagcattgttacaccatggaatcgcctgctgcgcgacgacgccttggccttgcgcgcttgcttgttgttccttcaccaggtggtcgcctaccatcacttgcctgtccagatggactagcatctgcgccgcttggaacttctgcattcttcgggcatttcttgtaagtatggccgcgcagatcacacttgctgcagcgtaaagtcctcccacctgcttctgactcatccatatcatttctgatgcgtctagtttggcgtcgaccctttttcacccttaacttagatggatctggaatgtaaaaaacttgggcactcagcgttgtgtaagatcctgagatcccaaacccatatatctcctcactccatgtatgaaagattgcttctttcctgaaataatttgagacgtacacattgggagatatgccacaatcaccggcagcagcaagaacgtgtgagcaaggaaggtgatgaagcttcggcttcatacaactgcaggtacatccaccatccgccttcaagacacattcctgcacggcttgcttgcgatagataccacgcctgctcctatcaacacacattatttcataccgatgcacttgtgtgccttgagcaacaactctatgtctccgtgcctttttgattttatcttccatgtactttgtcactacgttgccaaacactatgttgttatcggccatggacggaccaattttcttgtatcgatccctaaagtacgcttgcgtgccgtgaaggatgaattcaacaatagcaaccaatggaagtacccgaactcctcgcattacccagttgtacacctctgccaaattggttgtcattatgccataccgagatccatcggtgtcgaacaatagagaccacttctccttaggctcattctcaatccactgagtgaaatttctgatggacgaccctgacctccttctcattgttggtgggtcatcatgtaatgcaccaagaggtatgggaggctcgtcaccttcaacttgtggtctgcgagattgctcatctgtttgcttcgttgtcaactcatccaacttgtcccacaactcattaaatttcttctcttggttctgtgcacagagcctcttaaagagctccataagatgcttgttcttgaattgcttgtagaaatttgcacccatgtgacgcatgcaccaccgactccgaacatcaggccacttagctggaagtcccttctcatcccaaccgttctgcaagtagtcaatagcccgcaacatacccgcatgacgatcatgtataaggcaaacgttgggcctcatacgcaccactgcaatgtgcactctctctaggaaccagtaccagctttcagtgttctcactctctacaaatgcaaaagccataggtagaacctggttgttcccatcacacccaattgctgtcaatatctgacctcggtatttacctgtcataaaagttccatctatgcatagaacaggtcgacaatgcacaaaagcattgatgcaagcacccaatgagaaaaaggctctttgcagcacactctttgttcgatcatcaaccgatgtaaatgtatgtaggtcatagtaagtattattattcctctgggcaatggtggctaacaaacgaggcaaattatcataagaagcttcaaatgtgccatacctcatctcaataatcttttgtttggctctccaggcctttgcatagcttatggtgtacttgaatttgttctcgatgtgcctaataattgattttggttcaaagccaatgttaccaacaacactgctgtacatctcacttgccacaaaagctgaagtgatgtttcggtgatacttctccaccccttgtaagtagcacttgtgctcggtcacaatgctaactttccaataatcattccatttacccttatatgcatggacgtgccacggacaatcttccttcatgcacctcacttcatacacataatttgttgacttgaccaccctaaactctctctgcaaggaaactgcccaatgcttcaccgcttccttcatctcatccttatgagcataccttgcaccgtcaattacctcgttctccttatactcccagggtacatgatcaccctctgatataacaagtccagagaagtcctcatttgcccaatcagtggccattacatcaccttcctcatcggatgatgcgtcgtcgtccgcttcctcattatccgaatcttccctctccatttcatcaacaattataccgactctctccccctcatccgccatgcccatggcctgctcctcccttagttgattttcctcattttgcatcgatggtccaacaacatcccctgcattgataggaccctctacatcttcggtttgcattgaaacatttatatctttctcttgtaccgacacaaatataacaaggggccatgaccgttcaaaagccatttccacataccgtctccaagcagcagtgctgtccatcggcattagttcccaaaaataaccttctgttgcacgactcactacaactgatactgacattgtgtagagttcttggtctattctaaatcctctcaacaaccaactataaattgactgaaatgttctctccgcaggcctatcgatgcccttagatgtcattacaaaatctgacagatcaacaccatctagaccaaatctaatatttccttcatcgtgaactatctgaaatgtgaccttatttgacattgtgcctgatgaaaacaataactgcgttaacctcgcatttctgtactacgccctaagttacattctctacaatattgttctccaaaattctaaaagtaggttacattttccagatcaaactaaactacatcttataattaacactactgtctatgtctcaattcatactattatattctatgctctggatctacacatatgtgatgtgtgctacagatatgctaaaatatatggaactaaaactaaaacgcaacatatatactcaaacataacatattagtacaaatgcaaaagatgtatgggagcaaacctgtgatgaagtgagcgaaccagcagggcttcgccgctccccttctgctgccctcccctctctctctttcgtttttttggatttttagtgaatataatgaaatttcagagaggggggactgggctttataggggggaggcaaaaatcgccctcccccagggcggcaagggggccgcctgcaaaattccatgccccctcgccgcccatttgcaggcggccccccgcacagtacaaaatcgccctagcggagggcggcaagggggccgcctgcaaatttcgttgacggccgtcgcccgagagcgaacggccgtctgccacgtcattttcgccgccctctgggatggcgatttttaaaaatcgccctcccagagggcggtaggcgactacttccgtcaattttcaaaatggaaaattatttttgtaaaacttttaataaaaaaaattaaaaataaaaaaaattcgctactcgctagtgaggcagagacaccgagagaggagattaactgacggcggatcgattcctccatcgctcctgctccaagctcccgcaccgcatcgctctcccctctcccccgtcggaacgtgatcctctaacgtagtgccctctaactttgagaggatgacatgtgggccccacagctgatggacccacatgtcagccacccacatctttcttgatgaaacccacgtcctcctccagcgtgtcgttggcgggcaccttcttcttgtccctcctgatccggtgcacctccgtcaacaccagcgaggctatggagatcgtggcctctagccctatctcccactcgcccatttcgatcgatttttggtggtggtggtgtggtgcgtatgcgtggttcttttatcttgtaaactgtggttgtgtgctcttgttccagagagacactgatcgatcaggatcgatcgtttatatagctgttccgtacttcagtcagtccaacttactttcagaataatttggtcttttgctcaggcatggtgttccgtgatcaaccaacttgctgtacagcaccggccagttgatcagactagccagcagcgaagcatggaggggaagggggagggggggtgggcaacttgtgacaaactgacaaaactgtgataaagaaaagaaagagataataccattgtaccctcccaataagcaattatcatgtctatattagaaacacccctcaacttgaaaactggtatcgaacctctctcgactatctattataaaaactaattgatatagcgaaacaacgcgactaaccttccgattgttttagccattcaaatatgatatgacgatacagtaacatatgatatttgtcatcgtgattcagcgcaaacatgcatatcgtgccctctaacccaaccccccaccctcgctcatttcgattttggtggtggtacgcatatgtatttcttttgtcttccaaactgtggagtgtggttgtactgctcattccagagagacgctctgatctgcaggatcgatcgcttatatatatagctgttccatactttccgttggatataattaatagaagagcagggctgcaggaagatatgtccaacttgctgcttaatgatgacgccttctgaataatttggtctcttgctcgagatgggtgtgtcgtgatcaatcaacttgctgtataccacaggccggccagttgatcaaactagccagcggtgaagccagaatttggatcggagccaacttgtgacaaactgacaaaccgtgataaaaaaagagataataccattgtacccctcccaaatacacaattatcattcctatcttaaaatgcacccctgtaacatccagaatttttcgcttcgtttaaaacctaatttaaatacaaaacctatttttcaaaatttggttcttatttggatttttccctatgccattaaagatctcaaatatctcattccaagtccacaaataaagtcatataattattagagtccacagtcccttttacagtccatttacaaaaattgaaattcaaatctccttcaaattcctaggaaaaataccaaaacccccagtccccccaggccaccaatcttctcgttctctccttccctcggcccacaccccacccagctccttccccgactttttttcggttttagattttttttaaaaaatatttacagaaataatctatcagccaaaaaaattacaaaaatagaccctgccgcccacctctggggcggcaagctgaagtggcaaacgggggaggaacgggcggtgacggagggagggttttttgcaggaaaacccttgccgccctcaaggggcccgaatgcaaaaaagccagtcggggccggctattttgcaggcggccccttgccgccctctggccgggcggcaggcctcgctgcctataaaaggcatgctgcccaacccccagccctcattcttctctcctcaattccagtgaaaaaaaaagaagagaggggaggagaagagaagaaggggcgaagccctgtcggattcagacgccgattttaggtaatattcatagatcctatatgtgactattgagttaaatagtgtgtattctttaaaaatttatttgaataaatgcattatatttttagggttttagttgtactaatctagaagtgcgtattgtagatatcggtaactacgtagatctgctagtttggaatcaatacattaccgttgcattagcttacacaagaagatattacgttgtagatgtttattgcatgaaagagtaatatgatctagttatttcgttgacagatatgtcgaacaaacaaatattccaagtttaccatggaccaggaaacgtccgttacgggccaactggggtagatctgtcagattttattgtatcagaaaggggaattgatagaccggctgagaggagtgtaccttctataaaaggatggttaatgaggggcttgagagttgatccacagacaagtgacataacaatcaatgttatagtaagtcgggcaactgagggtttttattgggaactaatgccagttcaaaactctcgagtgtggagatggtatttggaaaatgcattgcaacgcgggtggcctctagctttggttccgtttgttcacccgaaggatccaggtgtgcagatgaacatggatgatggcgagggaccaagtgctgaagtaaacgagacttctgtggaggaggtcaacgcacaagaggacgggggtgtagtagctccagtgggcattcaaccaggtggagtggtcgacgagggggagactgtcggtgccattgtggatgaaatggagaaggaggattctgacaacgagcgtgtagaggaaggtgattcgtcagatgatgagacggatattaatccagcagaatgggctagtgaggatttttctgagctgatcgtctctgaagaggatagtgtgtgatgggagtacaaagaaaatgaggttattcagggagcaatttatagtagagcagaagatatgaaggaggcggtaaaacattttgcagtgtcacttcatagagagttttgggttgccaagtcgaaccggtcgcaatatgaagttcggtgtgttaaggaaaaagatggttgtccctggagagtgcacgcgtataaggggaaatggaaggattattggacagtgtcagtcgttaccaagcatacatgttttctacctggtgttcagaaataccacaggaacattacttgtgcatttgttgcatctgagatgtatgcgcatgtcatcgataatctcacatatgaaccaaggtcaataatccgacacatcgaagagacatacaagtatactattagctatgccaaggcctggagggccaaacagaaaataatagagatgagatttggaacttacgaagcctcgtatgacaatttgccacacctgcttggtgttatcgaggaaagaaaccctgggagctcttacgaagtgaagaaattcccctcaattgaacatcctagcaagagtgtgctgcaaagggcattcttagctctacatgcatgcaagatggcattcgtgaactgtcgtcctgttctctgcattgatgggacattcttgacaggaaagtatcggggccagatactaacagcaatagggatagatgggaacaatcaggtattgcccttggcatttgcttttgttgagagtgagaataccgacagctggtactggttcctgaaattggttaaaacaaaagttgttggtatgaggccaaatgtgtgcctgatacatgataggcacgctggcattctgcgagcgatagaagagttgcagtttgggagtatggaacgaggataccccggtgtttgggaagatctacagagtaggtggtgcatgcgtcatatgggagctaatttcttcaagcaattcaagaacaaggagctcatgaacatgttcaagaggctgtgcaatcagaaccaggagaaaaaaatcaatgagctttggaagagattagatgagttgacaaccaaatgtagtgatcagcgtgcagcggctccatcgaccgccgttgctgaccctcctcaagctcttggacctctcccaacggatagtccaacattggttagaagaactggattggagattcggaaattttctcagtggattctgcatgaaccaaaagagaaatgggccaaggcgtatgacacaggtggtgctagatatggaataatgacaacaaatttggtagaagtttacaattgggtgatgcgcggtgtccgtggactgccactagttggcatagtggagttcattttacatgggacatgcaggtattttagggatcggttccaggcagttcttccctctatgccgaacaacagcattttgtttggagctttcatgcagaaaaagctagaggagttgcgtaaaaggccatgaaacatcgagctctagtgcaaggtacccaacagcagaagtttgagatactatgtcaagataaggcaggcaggggtatctaccgcaagagagtgaagcaggagtgtgttttcaaagccgacggcacatgtcattgctcttatgcaaagccgaagctgctccacaggccatgcacccatgtcattgctgccgcagcggagtgtggcataccagatgcagtatatgtgtcacagtacttcagtaagcaagcaatatatcatacatggagcggcgagatttatgggttcggcatagctggggagttcacagagactaacgatgaagtactcaatattcctgacccatcgaagctccgaggcaaggctggaaggaggaggactcgtcgcatccgcaacgatatggacgagtcggaggctggcatggtgaagcgttgcagcaaatgcgatgaacatgggcacacctacaagcattgtcctaaagacaaggagaaaccaagtggggcggaggcaggactatcaggatcagcagcagatggagctcgccctacgggtgaaggcactacctccactcgaccacgtcctaggcgtcgtcgtgccacgtctggctacgtggtgtagttcttatgttctatgtcggcatgtggatttgcttgtaattcgtttcgaacttatcgatgtgtttatgtttcgtcgtgtaatgtcagacttcggcatgtcatgtctttaggtctcgtgatgtaacgtcggactaaggcgcctaacgtctttaggtatgctgatggactgtggacaggtccctcctagcagctttggtcgatcgatggaggccagagacgcacacttttcacttgccgtgcggtgaggtagcccctaccctacaggacgtatcgtacttgttggggctaccgctcgcgggagacgctgttgggctagtgaccacggctgtggactggcaggacgatctgacggcacgtttcgcactagtacagcgcgcaccgcacctcccgctcgagccgttggcacaccaccgcaacaccggacctacgaagaggtggctgcttcagttcaccgtgagtgtttttgtaccgaaatgacaatcgtattacatatttagtccgcagttaaggtgcctaacattttatcgacggcttgcaggttgagcagctacaggcggaggccgacgagtactcctacagccgatgtttggaggcgtacttgctctggctttttggctgggtgatgttctgtggcggtcacgggcacgcggtcgacaagggactcgtgcactacgccaggagcatcgccgacgccgcggtaggcgaggtgcctcagtggagctggggttccgcgttgttggcggctctgtaccgtgcactttgtgagtcttgcacgaagacggatcccagcgcgaccttcggtgggtaccctctctttctttctatctgggcagctgagaggattgcgatcggccgccctgaggtggaccagcacgcgtacgaggagtcactgtacgaggagcgaccagaggtcgactaccctatgatgggtactctgtggtgccgtcgtcaggtacgttgcatcgatcttatcgtattgttaagttaattgctaagttcattgtacatcacatcgatcgtctcgtattgcagcgccgatgggctcacgtccaggttaggcggtcgtatcctgagtttgttatggagttcgaccgccttctgccgactgacgtcgtgtgggagccctacagtgccgcggctacccaggctcgtgcgccgttgggtctgtccacactctgcactagggactaggcgtactggatgactacggttccgatggtcttcgacatctgcgttgagcctcacgcccctttccgcgtaatgcggcagttcggcttccgtcagccctttccagtaccgtttccgaccaccgtcccagctgctgttcaccggtaagatcttgcactacgctttccgttgttgcattaaaatctgcctgttcacaatagtttgtaacatctgtcgtttcacactaatattacacattaattcgcaggtacttgcgcaagggtcagcagtcagctggcgactggcccgccaagttggcgacttttgttgaggactggctgctcgcaaccgaggaggtcgtggaccacgagggagagccacacactgaggagtcgtaccaggcctacctacgctggtaccagccacgcacccgtactagggtcaccttcgctcccttggagaagcagccccacgttgcgagcactagagacctctatgccaggcaccgcgaccaggacttcgctcgtgctgtgagtaccctgcatcgcaccattcctttatgttttcatgtctttctcttcgtcaaattttacgaatatttatgaacaaattaaccatgcaggtcgacgacatcaaccgggtcgtcgttgacggttcaacgacgatccaacatttaggcgcggggattccggtacccgtagaggagcacctgacgacgtacacgcggatggtggagtcgatgcgctcgattctccgagtgctcacctgtcctgcagacgacgttgctcgggcagacacagctgtacagcggccacccgtaccgactggtccccatccagctgcgcacgttcctaggccgactccccctccgtacggaggtaagtatttttattactatttctgtacatgcctcgcacatataagtgagccgtttcacttgccgattgcttcagggtttcgtgcaccgttcagcaccccgccttcctcggctaggccttctgttgtgccccccacaggtacttaaaaaaacaacattacttcgacaatcaatttacatacattttatgtcttagcttacaagggtcccgttgtcgatgtgtaggtttcgcccagttcgctatgacacaggccgcccacttctcccaggctgcagggtcagcgtctcaggcagctgtgtcgacctcgtactcagcgcagttctggcagtacaccgggacttcgtcacaggtagccggcacgtcgagtcagggtccaccactggaccatgctgggacctcgtcggaccgcttgctgccttccaccttgctcttcgacatcactgacttcgacttcgcttcaggctcgacagaggacgtcatcggcccctcacagctgggaggcgcaccgccggtgcagacgcaggaccaggcgcaggccactcctccgcgggacactcgtgctacccgtgctgtgccaccggatcgtttcacctactcccaggaccacatgcgagcacaggcccggaggaccaagcgtggtcgcggcgcggggcagggccagtagagcagtcttctctttgtttacttgcttcactttctagtactgtatgcttgtgtaatgactacgttgttgttatatgtgcacgatacctttcggcgcatgcacgactactttctgccacaccgatgcagcctcctttattcgcgtgtgatacgagtatttgcccgccatttggcgcatacgaccaatgtaactttcggcaccgatcatgaatgtatctttcggcgccaatcaggcgtacccaccataccccaccacgttcacatgtcaggggtatcactcgattttttgcgcctatataagtcgccttaacgagtgaggcctcacaatctttcagaactcagtcacattcagtactctcttccccacttgcttcattacaaatctgaccggttttcgtcaatggctagacgccggggtgttgaggatccaaactggcgtagtgatcattgtgtatacctactaccaccttggtgccagcgtcctctctgcctatgcggtgatcgatgccaactaatggcttcgaggaatcctgatattcgaggaaggcgcttttttaggtgccctaactatgaccgtgaggtattttattatctgcatatgcttattcattccgtatgggcaatcgctttattcttcgtaacactactctattcggcagacccgcactacggcttgcgcatacatcgagtgggtcgatacagaaaatctcgttctcgacctaaccacttgtttacaagaaggtcgctggtatttcgcatccgaaagtactgagcaatacttacagagaaaagcggcttatgaacgacaatgtcgtgaacaacagagcgactggcgggtgctaactacggcactccctccatgggaagcccgtccaagatgcaggtgtggtgatcgttgtcaggttcttcgttccataaatcctacaacattgggtcgaaagttctttgtttgtccaaatattcttgacgacgatttcatggtaagaatattttgattacatgaatccttattttctcacaacatttactaactttgcttgctttacatctattatttcctcccaggaaccaccaaggagatgtcaatacagagaatggatagacaccagaagggttctaactccacctagccgtgttgtgcagcttgaactaccagatcaatacagggttactaaagcgcggtttgagagaggagagggatcctcacgtaggggttagctattatcggacaacttggcatattgaaatttttactgtcatgcttccttgtcccattactacatcatcgttgtgttcaactattgcactacctccctcctagttcgaatctaatatcatctatgtaaccgcaatgcaaatagttgtatcatgttcaaattgtactactatttcttcatgttacataattctccttgtttaagtccatataatgtttctacgacccagactgcgataggcctatataaattatccgaatactaatacgtcaaataaggtacaaaataatacctcacttaacatatgaaattgcgcaacaaccaacttcaatacatttttataacaatattaacaagttttaccaataaatacttctttatttattattaacataacatagaaaaatcttttggccgtacttttttcatctgggtcccttgccgccccaaaagtacggccgcaagctctttatgggcggctaaaattacaattagccccttgccgctctctatatgggcggcaagggcctaatcgcaattttggccgacggcggcagacggcgcggtcgacccaccgtctgccacgtcagcttgctgcccaccattagggcggcaggggctatttctgcaatttttttggtcgatagattatttctgtaaatattaaaaaaaaatctaaaaacgaaaaaaattcctccttcccctccctaggccggcccacctccctctccaccttggcggcccagcccggcctagccatgttgtccttcgcatgccaagccaacgccactactcctgctccctcagccgtgcgtccacgccgcccgtgtgagccgcgttcacgccgccgtgccgccactgtgccccgcttccttctccttgaagccgtccacaccgaacgcctgcgctgcgcccacgcccaccgcgtcgccacagtgccgcctccttttgtccttctccccgaagccaccaagctctcttccttcccctcgaagccactgcaatcgaatccgccataaacgccacctgacccatcaccctccacctttcgcctcccattccccgccgccaccattgcctccccgccatcggccagagcaccgccccgcgcacgggcgccgcctccgcgacccactaccacctctgcctccgccacagaagccgccgtagccgccgtcttcatcctcccccaggctggcgtcgcgccgccccggccgtcgtcgtcgcgccatggccgcccccgccttcctctgccccacgccctcctcgaccactgcgacagccgccgtcgtctccgccttgcctcgaccgggccgccgcaccgccggggctgagcacagaaggcgcgaccgcctcctcgcgcgccgtctctcaggcaccgactgccggtcccctctccactgccccgccgccttccccagtcgtcgtgccggccgtcgttgccgtcgccgcgtcgactgccgtcttgccatgcccggtcctccctccgctcgagcgtgcacgcgagaaggagagaaggggatcgagaggaggagagatcgagaagaggagaaaagaaaagaaaacgaaattcagtgctgtcttaacaagcacagcattttcaggttttcttgatgcatataaaaaggtacaaactagagatggtctcagtggcttcctgattccacacccacaagcacacaaagtccatgacttatgaaattgacttgcccacatggtgtagcacatccagtgcacatactttgcacgcataattatgaaacagcaacaacacacatgacctaaacttatcaaactctacaaacaaaaagtatgaagggaaatgcgcaaaaactataagatacatgaaatggaaacacaaacaacaatataatccaaaccatcattcagctaataagcggtcatgcccccttaagaactggttggttttgatttagagcaagctggtcacacaggttcttcaggagttcctcgttgtggtcacctatgagaataacttcggtcaggcttggaagagatgatacaccagaaaacccattattgtctacgtgcatgcaattatttatctgcagcaattaattattaatcgctacttgcatgaagtttaatgatttgaggccttcttgatctttaagctccatcaggcttgggaaagtgccctgctgaaaatcaaaatgtatttttttgcactgaagaaaagagctcttccacggtcgaagaatggccaaatgtggtagcttcccaaggatttccatggaagaagccaacttcaactgggtgctcctaagcttcaacttagccaaattatggagctgggtgaaatattgagggaattaaaatttccttgaaaaatcatggccagaaatatttttgtaatattttccgtgctctaaaatattctctgaaagttcccgtgaattttcagagcacaagaaataattttaacaccacaaagttcatttaattagttaaattaaattgaaaacaaataaaacccccctccttttcctttgggccgcttctggcccaaggtcctttcttcctccctcgcagcctgctcggcctgcctccttttcccgtccctctcgggccagcccttggctcccctccgttcggcccgctcaccttcccctctcctgaagtctattttgcttccctctcctggcctcctctctccctccctcgccagcaggtgggcccggcgaccccacttgtcagctccatgcccacaaccgccgtccacctcgacgtcgccgccaaatctggccccctcccgcacccgtgctcgcgtccaaccgcgtgggcacgaccccatccacatcctccaccacccccaaaaaatggcgccggtggagccccacatcacccacgtcgccaccccacttcgtcggcaccttctgcctcttccggcctcgtgccgagccctcgaggcctataaaatgctccctacacctcctctctctcgtttcccccaactcccgagcttccccgcgccagaaatcatgctcgcaacgccgagcctgtgcaccgctacttgctgtcgaactccggtcgccgcttcccgccgccctagccaccgccgagctgtgccgccaccaccgccgagccttgccacagcccgtccgcagctccgttttccccctccacaaccgaaacactgcccacttcatccgcctccggccggtcactgccgccaccctagccaccgccaccccatgcggcctccaccaccaactccaccgcgccccgacgcacctcggccaccgctccgtcggacccaatcgttgccgcaaccctctcctccatgtcaaggtgagctctaccccatgtcgccactgtcggccgtcattctcggctgcccctcgccatcgacagaagccaccgaagcgccttctgcaccgtcgtcccgcgggcgccgccgccatctccccgccgtgaagttccccgtggtgccacttgcagctgtcgggcgctcggtaagtactccctcctcctccttctctccttttcccccctcctttcaccgcttcccgtgccgctgctcgtcgccggtctcgccaccggtggccgtctggccgtgtgccgccgcgcgccgttgctcggtcgggccgactctgtgccgtgcctgtgccccagccgcgccgcccatggccgcccgattcgcttgggccgatccgggccgtcggttctagtggaccggcggtggaccaccttggtggtcccggtccacggtggaccgcccccttgtgccgctgactcatggggcccgcatatcggcgtcggcctccccttgatgacgttagcaccgtcctttttcctttagaaaatatttaataattgcgtcataaattgagtataattctagaaattgatttaaatggcacaaaatttctaaaatttgtaactaattcataggaactcgaaattgagccatccaaattgcaaaattcatctaaaattgatcttttaatgtttgtatacttttatgtactgtttacttagtttttattagagtttttcctcgttttgcatgccagcgtgtagattccgtcatttcggatgtccgcggacacgaggaaaagagttccgaagatcttttgaagtagcaagataagtcacacttttccccttgagcatattgagcctactttataaatgttttactgtttacaaataaatatgcatgttttgctaattgcatgggattattggtttacctatctactcgcttgtgccatatttacttgatatccgtccttcgctaaacttgggtgataatttgcctagctcgtgttacttatgtgaccaagctagaattatatatgcttagccatgcttaattaccactagctaacataatgggataattacattattagacatctagtatcttgacaatctgcgtgctcgagacatccggccatgtttcattggtcgtaattatccaactaaaatgggacttaatggtgggctgtgggtgcatggttttgctagttgcacccatggtaattaaggaccagttcacgagaaaccctggaagacttaccgtgcttaccacaagcaggaatgggtaactgcttgacttgtagtatagctcgaccctttcctaggcaccggtggcgagggtgggcgtgatggaattgggtcgaccggggtgtccggttgtccaactttcggattcaccgcggcgcatggggactacccacttccggtttaggggtgggggtgaaacctcagcgtggtgtggatggttaagggagggttatgcgaagggttttttcatagtcactcgacatggtgatgtgtctgcgcatgcacggtgacatgccggtggattgtgtcttgtgggtgttgacggtcgttatcgaccaatttcgaccgtcaatattgcccatttaatgaagactagttatgcttgcgatgcataatttccaaataaaatatctacttccagtatgtactatgctactaacatatatgcaggagaagcacacataaatggaggagaattgacggaacataaacaaacaattaactggaagctgtcgaaaggtatactcatgaatggttgggtctctaaacccagtaaaataatatcaattgggctcaaccattacaactactaggctgaggaatcaacgaggagtacacctgccgagtggtgggctgattgggcctggccagggttcgaccgaaccagtagctagcccaatcagcccaattgtgcaccacctggtagttatcagcatcccaaggcggttatgactggttaaacctgaagaaaccatccctggacacatgtcacaaggaggtgaagcaagaaggaatatgctcattggataccttgggcatctccgctctcccaaggcacctcatggcctataaatacctctcatctcattcattccgtcacacactcaaggagaagattaagagctctctcaagtttagtagtattctagtgctagtggagtaggaattaaaatagtattcttagtcttcgagtcttcaggagaattcgggtatggctctagtagtttttctctcttcttttgtaagacttatcgaattaatagaatatttttctttatacatcttctgtatttcattccattcattttatctgagtaccgactttattttatacttgtatcaatatagttctgtaggtagcctactagagaggtgcaatggtgtgggtttaatgtccgagtattcggttactctatgttgggagctcgaatgcagagtagtatttaataatgtaagcgtggttcttagattattagatatcattaattggaaatatatgctgcgggacagtagaggtgggccgctgatggtgacagctcaatacaggtattcctccacgttagtatatattcctaagacaaatttctggggagggtactcctccgtatttggcctcgggtggacagccatgataggttgtcgtatggaactcggcaacccagggtggtttctcgaaacaccaagaggacactgttagggggtattggttgcaagactgtatactagcaagtgtaaactaaagatatttgtatactagaagtataggagtgaattcttttcttattctttctgcacttagcttagatgatattttagtgagagtaacttagttctttcttctgtgtgtcacctttatcctacccttggaattacttaacccctgcatagaccttaatgtatacaagtaatatataaactattagcgtagtactctcttatcatatcttcccttgggattaaataaatacgataccttgaaatactttcgggtgaaatgctacaatggtatatccgtgcgcttgcggatcacatatgtaaccataaatataccatgaatatttctacgtcactgctggaaattatatttctagtaatgtcgttaaaaaatatcaacaatgggtacagttgtgcacctctggccagagtaaaactattcgaatagtcatgcccgcggttatggacgatcgaccaacttcaccgtattagtctcacccttaataaatttacttaatgaaccggtgtagttcaggtggtttggttgggcctattcaatgtggtgtagcattgatcaatggagatttaatattaccttaattaatcaactgctttactgtttttaacaataaattctttacaaccgcctttatgcaaatagccacaagccttccgttgtatccccttgcacgtctacatcattggtgtggcttgctaagtacggtggttgtactcagcattgctattatttcccctttcagaagtgtagcgcttctgagctgaagacatagttagagtaccaaggctcataccccagttgagttttgcctgtggagtggagctgaaccccgctaggatcgcctttttccactgttgtcgttttctttcggtgtgaggactaagtgcctcttctgtaagtatttacgctttatttacgcttggatctgtatattaatttgtcgttttgtataccctggctgattcctggacagggatttaatacacaaaatagtggaaatttgggctaaatttatgggcgtgacacgtaatacgactttcccagttgcaacattaacaacaccaagtgtgtacaggtcattcagttggccaatcccttcagctgctttaacaccacacatatcaagtccctgtagaatagtaggtaacaagaccttgcaatatttgtggaatatgtcacgcttctttcattgtcagtattttgcactgtttttgtgcaataagctgctttcctgtccaataccacagtgccaaattgaactgatttggctttaacatctggtatttcaaaatattacttccatatccagaccatggagttttaggcccacaaactcatcgaagtaccagaaaatgagcccaaccaccatgtcaatgggctaacaattcttttgccagagcctagtagaaaggcctaggctagatgggccaaccagggtttggtctaacccctgatttgaccgaacaaggtctagcccagctagcccaaaaacttcataggccggtagttattgacattccaaggcagttgtgaccgtttctacctgaagaaacagcacaaggaggtgaagcaagagggaatatgctcatcggatgccttgagcatctctacactcccaaggcacttcttggcctataaacacccctctcctctctcattcacaacacactaagatgtagcttgagctgacttataagagactttttgtatgctttattgtatacttagaataggaaaagagtaaggtagaagaaatcggaggaattccggagttgtcggtaatctcctcttactttttgtaccttgttaattactctgatttaatagaaatattttatgagtaattaagatttattttgtgagaattatatcttagttagttcctattagcatactgaatcattgtttactattgttcattaatagatactgattactttagtctttagctaacgctagagtagtaattaattgcgcggacgtggtgtctaggtagttaatttccagttattgccatgtatcccacagttcgttagaggttgatgtaaggtagtgatagctctcaagaacatcgcagtcctccctgtccggttacggagtagagtgcgttctagtagcagtgagcataccagtgcctgaagtagtgctatagattaaacaagctttctgtagacattgtttgttactaggaaatcctatctacccttttcctatcattgttttgtgtctttgaataaacttggagagagctgagcacacatgttcattgtggaaatcgataccttgaaatactcctgggtgaagtgctacatcggtatatcgatgcgcttgcagattctatctgtaacgttaagaaataccaacatcaacctagatagaatatcggacttaaccgagaaagttctagccacaccaatacaagcgaagttgatggaacttccttaccagagatcaaacttaaccgatgcagcccaacttgaaactaagaacttgccggaataaagggtggtgatgcgctgaaagtaattatattgatttttggagatagattacaaagacccttggtgtacatatttatactctcgggttgatataagtcttaatcggatactatataaaattttcctaacaagaaaaggaaaataacaaatcctacatatttaagagataaactaaggaaatatgaaactgacttgaaactgacttgccatggccttcacgattcgtctttagattcagcttgatctggataaagttccatctaccaatcgacgtctttccttaactgaatccactagataatctaccaaattttggcattaacagggcgacagcagctaggagagctgaagtgtccagttctggccgtagctaggcaaagcccatggtggagtgtgccgcgagaccaaacgaatcggcttggcggtgaaataggctgttgttttgctagcggcgtgctaggagcgttgccagtgcagctgcagcatgaaagaggaacggtggaggtcagcagcgaagataacgtgacggttgggttcccggctttcacatggcgggtgatggttgtgattttgagtggcaatgaaatggtgggatgggcttgtccttgtctccctttttcgctcacggcatcctatcttactataaagttatcccccactaactccttaagcttaacatgtaaagatgccacatcatcatccactaacaagatgccacatcatgatccactaattaacaagatgccacattatcatccactaacaaccatcacatttaaacatcatgcaaacatgctactatatctttatagtttttataatttaagagtttttcaaatacaaacatgttaagttatcatccaatataattcacataatgtttcaatgtatatctttattatgttttatgatatcctatatacttatatagttcatcatcacttagttagtgcttaaatgattaatctatagtcaaaattatctttctccttttttcctctaattaagtcataccacatcatttgcttttagcctttagatgattaatctacggtccaaactatctccctactcttcttcttccataaagtcataccaccttactttttacgtttgaatcaccattctacatactatttaaatttaaattaccataaaccatattaatttacttaatttgatgttatctagctatcttatacgttactttttttattgttatcatactaaattcccgcagcaatgtgcggggtttcacctagttactataaggtttagaccttagttctatttgttaaggttttgagcctaagcgctgggtttggtgccgcaggttattttgatttagtgtaagggtgtgagtctcagttttcttgtttggttgtcttgactatatacatccattttagatgtagagcccagtttaatataaaccattatctaaaaaaaattggttgcctagtgaaagatatatctcaagtgaagaaaattgctaatttgttttaggtcaagatatttcaaaccagatgtgctctgcaaatcaaacaccagaagcaatctcctctcgctggactggaatctaaagaagtactccctccgtctcattttaagtgcaaccataagtttccgtgcccaactttaagaatccgtcttatttgaaatttttctgtaagtagtatttttattgttatgagatgataaaatatgaatagtactttatatgtgacttatacttttcaaatttttcaaaaaaatttcaaataaaatggacggtcaaagttatgcatggaaaatcatggctgcacttagaatgggatggagggagtaaatatcatctccactcacctaacttggtcactgattatacgtgggaaatgtctttgttctccaatgtgttcatgtatcacctatcccgattatggatttttgactgcacacaatcctctcttttttttcctgttggattactcacttcttagtgagatttacgaagtatgatgcccctgaaaaactagaaaaggaaaaaagaagcaagagctagcacgaacgggctagcccatcagtcaaaaagagtttagctggcatattgtgttagtgatatgccctagaggcaatcatagagatgattgtattacatactatgtttacatatttatctgactttgttccttgaaatagataaactcattattggttaatgaatatgtgattctttcatgagactctttatgttatgtgttgctatttctaaaggatccctgatcaaatatcatatgtggaacaaatatgtttatatgatcagcacatgtattaattgatgatcatgtctcatgaatcatggtacagagataccaaattaataatgtggacacatgttggtgaacatgttgttggatagacccaacatgagacactgcaagagccatatgtgttgtgtcatcagtgatctcatttagtgttggtgttgaatccttagacctgagattatcatggttcccaacatgtgtagtagcttacttagggactgctaaacgctactccgtaattgggtagttataaaagtagttttcgagtatgctatgaaacatgtagtaggatatgaataatcaagatgggatttgcccctcctatggagagatatctctaggcccctcgatgttgtagattatggaagtgcatggccatgccaaaggtgattgaggagtcaatcgcaagttatataatctatcaacaggttcaagtgaatgattgagctataagaggatggcacatatctagccttgagcttaatcgatatcgtgaggcaaaagggatcatacaagtatacactagaggttcagccgatatgatctttatgtatgcccggtgggtcaatacgttctgctaagggccgctattgatgcgtggaccgaaaaggagttttcgggttacagccgagtatatgtgaacgtacagggtcgcacgcttaatgggccggaataaggggattggatagagatccaatatgagcttaattcggatagggatccgaataggagtcctactggccttggaggcccgagtgatggatcctatatattcgtgaggggtgtcgctggcggaggtattgcgtcacatgagaaaccctagccgtcacttccctccccgagcaaaaccctagccgcgcgcgggtgctaacacatctgcgcgtggcgttccgtccctgtacgtgtggataccggtagaggcgccgctggtttgcggtgctgatcggcgtgggagtacggcgaggagaacgcacgaggaggagaaggtcgagccggtgcgatcgactacttcctctacatcgacgcgcgctacttcgcaagatttccttcgacttctcagcgtcttcttccgctgcgcagcgcgtcgagtggtaacgatctatgatctaatacttgcatggttcctggtttacgcgataaaaaattttgatttatgctatcgtagcctacgcgtatcccaacatattgggctttggcaatttgggcaagcactagttcagtagcagtagcactactctagtcccaaataagggattagacgcatcattggtttataaggtgtcgaaactagaattcgacaatatgaaaaggggtagtgcataagaaggaaagtgtatgggttatgagataagggtttaaacaggtttaggccttctcgatgagaagtaaatactctaattttgtttgaggatttgattcgctgatcgtgatattgatctgatgatctaaagtgtggttatgcccctcgagaggcaccctgcccttcttatatagtcggaggagccaagtttacagagtagagattttactccttacggtttaaatctctataactactttatgattctaagaatccaagactacgggatgtttctttgatactcaagtgaacacaatacccgagtccttatactatacatattctatttatatgaaccatcccatgcaacctgtcggatagctttgccatgtaggtatatggtacccataatctccacataaggcttgtttccaattaatcacgtataacattggtccaaaccattttgcgcaaaggacggcgaccttagagaattaacatcttggtgtgatataacaagttgagttcgggctagaatctttttgaccctggacatttcttacgtgtattatcatagccaacccttatggttcatacgtaggcatacaatgcatgtgggccgatgaagtcgacatatgatatgatgtatgtgaccatccgaatccagtccgttttcatccctaccatgtagatgtggtccaacaagttgagttgtgcctagaatcgtttctagaccctaggtgctacaaatcgtatcttacctaccattaaggttacatgtgtgtatagcctacctacgtgtgcatgaggtaaaaaacaacaaagaggttagggtgcaacgagcgaggccaatcgtgacgagggaggtgatcagtgtcggagccagaaaatttccacgcctaaggctaagctaatgggatctcaaatattttcataaattatatagcatttttcaagattataacggagattatggagctatgcatggggcccaagccctagctgccccatgcctgattctgcccctggaggtgatcgaagaatagagacaagcgaggcggtgttggcaggtggcgttgtagactctatcaacacagctaattggcccagctgagatggcaacccacatgctgacatgcgtgccgacgccactggcctatgcttatgcgggcctttatgggccaggatccaaatagatatgagaacatttttttaagtatttttctactattaagtgatttagaatagatagcaatatatgcaaattttttatttgaatgtttttgacaatattttagcttcttttgaattttttttatttttagtataattttgcaatagacttttcaactaaaagtttcatttgaaatttaaaaatttttagtaaactttcaactcaaaatttaaacctttcagctcaatattaaaaaatttgaactcaaaatttgaaactttcaattccaaatctgaaactatctactcattgtttaaactttcaattactccaaatttaaaactttcaacacaccttttaaaaattttaactcaactatttatttattaattcataaaagttaattttttaatgtacttaagcgctcctatttacggtgagttcgccgtgtcagtgggggcacgtctgtggttgaacgacttacgacgctaccgcatgccaccaactaggtgctaccagatcctggtcacgcatcgaggctacccaagcgcaccatctagtacatagtggagaggagagagggaagaggaataagtgagaggagaatggcagatgggtcgaaatagaattttttttatttcttgctaccgactaggatgccatgtaggctaaaactgcttgtgtctaagaagagcatagaaattaattgactttgaagagttcatcgataaataatgtctggttttaatgttttggaagtttatgaatatgtagaaaatacattttccctaattgaaacagtcttcaacttgtcgttaattgaaagtttgaaactaactttttttgggtgaaaatctatcatttcactattttgttagaaaataactccgaaaaggagaaatgaagtctatcaaactttctgtgccttaaaaacttaaattccggcacgcttaataaagtctataatctaaaatagcttcactaacatgtgacaatacagaagaaaatgcagaagaaagaatgctaattattttgatgggaacacacataaacatcacaggttacctaacatcgtgcgtgttgctcggggcacctcttcagtagttaagctcatcccaaaccccctaatgaacaaggaagagctccacaaaatgccaaagagaagagaaacagaggggacatataatttggtgctgccttaacaagcgcagcattttctggttttctttatgcatataaaacaaagtacaaactagacatggcctcagtgacctctcgactccacattcacaaacacatgaactccacagctcatgaaattaactcgcccacatggtgtagcacgtccagagcacacactttgaatgcagaattatgcaacagcaacagcacacgtgacctgaacttattaatctctaaagaaacaaaaagcatgaagggaaatgagcaataattataagatacatgaaaaggaaacacaaacaacaatagaaaccaatccatcattcagctcatatgcagtcatgccccctttagaattggttcgttttgattcagagcgatctggtcacgcaggttcttcatgagttcctcgttgtggtcacccttgagcataacttctcttaggcttggaagagatgacacaccagaaaacccattttcgtctatgtgtatacaattatcgatctgtagcaactcaagccttggcatcgctccttgcatgaaggttaatgatttgaggccttcttgatcttttaactccatcactataaggctcaggaaagtcccttgctgaaaatttaaacagagttctttgctctaaaaggagttcatccatagtcacaaaatggccaaatgcggtagcttcccaaggacttccaaggaaagatccaatttcaactaggtgctccgtagcttcaacttagtcaaattctgaatttgggtgatccatgttggcagtgtaactagatttccataaatcttgaggctttgaagcttacttggaggtgtgaatgtgtgatccaaacaaccttgtaaacctggttccccctctgatcgcaatgataatgagtgtaagaggacaaggtttgcaatggcagatagaacagcttggctatttttcttattgacccccgtcaatcctaacttatgtagttttttaagtttttcaagatcatgtaatatggctttctcggctgcaacattaacaacaccaagtgtgtgcaggtcattcagttggtcgatcccttcaggagcttcaacaccatacatgtcaagtccatgtagaatactaggaaacttgaccttgcaatattcgtggtatatgtcacgcatctttacattgtcagtattttgcattttttttctgcaataagctgctgtcatgtccaatgccgtcgtgccaagttgaactgatttggctacaaaatctggcatttctagatcatcaattgcctcatgcaccatttttgaaagatcacttgattctttcaactctatagaagaggtggcatcatcctttggtacattgccggcacaaaggtattggagcttcttcagcttggtgatggtctttggtagcttgatgatacgtgtaccactgacatctaacacctggatgtcccacaagttgcccaatgaatttggcagtttatagatatcggcacatcctctcaaagaaaggtaactgaggtgaagaaaaatgccaatttgatccaggtcatcatctttcaaacccgatgtgccctccaaatcaagaatccgaagcatcctcatcatgctaaaatctaaggatgatctccactccccaaatacagtcactgatcttacatgggtcagatcagcacactgcttcaatgcattcttgtttgtctcacatacgtcgattatagataaatggcgtattgtaccttcgttattagagctaacttttcttccttggattttgagatactaatcttgtgcataagattatgtactcgaaaatatttaatattgccagcattgtgaggtactggttctgatggttcaatgatgcttcgattgataagctctgcaaaatagctgtcacctacctcttctgcactcaagctatgagtcttacttatgtaaccttctgcaacccaacgtcttactatgcgtttgtgcctaatattgtggcctttgggaaaaacagacaagtacagaaggcataactttagatgataggataagtcatcataggatggttcaaggattgtacttattacttcaagattttttttgctcactgacccagaactaaaatcatcattcaactttttccattccgaagctgttttttgctttcttgccaagaaaccagcaatattggttattgcaaggggatgaccgtcacactcctttataatgagctttgcttgagtagacatgtcaagatccaaatcagtattcgaactatctacaaatacctacagttgttatgagaagattgtcaacatgcacaaatataaggtggatgaggtacattgtttctaaaaaagcaactaatgacaaaagagttgctacaaaaaaagatatgatgaaatatcccaaacaaaaggttcttataaaaatgcgcgtactaatattggcacatgttgacaaaagacgacatcaatgctcataagccacaatgaatactcaaatagtactgtgagatctccatatattactttgacaattataactggcaaaaacgtaagacttaggctgcgtccgggtggtggagttccccgcatagaaaatgtggtggtttattaatgtataattaattaagtattatataagaaaacttgaaaaattgattaatgtgttttaaagcaacttttgtatataattttttttcaaaaaaacacattgtttagtagtttaaaaagcgtgcgcatggaaaacgagagagatgagttgggaaagtgaacaaaaggactcaatcttagaatactatatggaggaatcttaaccaaaaagctatgcatagtaaggattagaatacccctgttcattttctattagtcacttaacatttttttagataataacacttaattacatatgtgagaaaacatttaatgctcaaaagtttgattgacaagcataaaaaaacacaattctttttaggattagtaggaataccttgttcttgaagagtgcaagtgccgcatcttctttaagaccttccagcttatatatgtttttgtatgtcaccgagcaatgctcagcaatacttgcttctcttgtggtgactatgatctttgtgtttgtctcattaggcaaatgtggttgtatcaagctccattcttcaatagataatacatcatcgaggacaagggggcatcttctcttcgaagccttgattgattcttcactcttctgcacaccatttccaagaagactaaaatcgtgtgcatctaattcctgggctaagctcgtaacaaaatcatgaaggttaaaaggatgcaatatagtgacccaggcatactgctcaaacatgctagtgatctctttgctttcatagacactcctaatgaaggaggttttgccaataccaatcattccccatatggagataatatgatgattctcgcagttctgagaaacaagttgaatgaggtgagatttttccatttctcgtccgatgtgtggagcattcctaaaagcaggtcccattgatcctgagattgaccgaaaaaaaaagtagcatgattacgagaggcgcatacaatgtggcaggggaattatatttttatagtgcttcatctgacctatttaaagataagtgtatcaaaataataatgattaattattttataaaaaaaattattctatctgtctctattactttcgttctaggactcaagttttgtaccaaattacttgccattctcatattataaaacatttttagatattagggcacgtttggttgtttgctgaactgggctatagcttggataggcgaaacagcccatacctgctatctctatcagaagctttgccatggccaaactatttggttggtctgcttcggaggctagcttttcgctcgatggttgcggaaattgtgcatgcaagatacgctcgccgtcagaggcgagcgaaatcggctctcccacgcgagccaggttaagctagattatattagcgttatcaaacgcctctcctcgctcggtaaggctaaaatagcccttgcatgggatccaaacgtgaccctttattaatgtaatgcaaccacacattagtacattcacagttctcattggttaatctcaactaattagagataataactgctttgaaaaaacaattggatgtacttaatgagggtaataacaatttaatttgtcatagcttcttggctattaagagtgatataattttataaataaaccctcttattaatgttttgaacaagagccttgttttaatcttttcctaaatctagacctttattaggctattccatcctaggaacaaatcctatacacacaagcttcctgtacacactccgtgcacatcaactagtaaatgtcacagaaaatactagtaaaaattgaacgcatactcctaatagtattacacatatctgcaaagtctcatattcaaattcattatattttagccgtaacaaaaaattgaaaaatctgacagtttttgggtaaaaatctgtcagaattttgtcttttttgttactgttaaaatataatgaatttgaagataagatctcacacgttggtgtaatactattgaaagtatgtgttcaattatttctaaaattttaaatgatatttgtacgggaagcttgtttgcataggatatgttccattccatcttagtggcacttcactgccacatgatcgttaatcacacatacaggacgcccacatctctggatctgcatctatgatgtggacttatcacaaacatggaacataagcctccagggagaacttttacggtgtttgcattctaaaaaaggtaaatatccaacgctctataatgaaaggtaccacttaaatggtattcaagtattgttataggtatttaggcaggaagggtaaaattataattgttttgaagatggagaagggtataattgtctcaatattagctctaggtacataggtaccgcatctgttcatcttctataatcctccattgtgttatttacgtgttcttttgtgagatttacatttggtatctaacaacaaggtccaacgctattcgtcttcttcctcccgtccaagcttaggcaaacaggaggagtaggctaagggcattgaggttctaatggctgtatgacaacggtgatggcggtaaacatgtctcgcggcacaacgcgcccatgggaaatggaggcaggcacaaaggacaacaagcgcgctcagaacaagagcgctagggtttgactcggggaaagaaagaatggcgggtagtgagctttagtcggtatttcggccacctaagggcgtcaccacgcgtcctagccgataggtaatccgtttttccgaagttgttgacgaaagtggtgcgggagtgattggtagcggtggagcttgatgggatggcacaggaatggccatggacaagaacgagacggtggaggagaacaaaggagacatcaatcttcgctttttgtcccatgcagatcaattaaatccactaaatttgcagaagatttacattgtttctgccaaacgatacaagccactaaatctttggaagatttactctggttcctattgaaagataccgatcatatatatggagctagctattctctattcactgaaaataccgtattttactagttaattaccgcactgccatcgtttacgataattttattccgtaccttgcccctctcttaatcaacggtacatattattctatctctcagtacttctaagtacctcacaaacaccgcaaaagctctattagggaaagagatcacacgcattgttttccttccatgtccatttctatgataagagacgcagatgtatcaggcatttgtgaaaaaattgtcagagacacttttttatttaaccgcgtctctgataatagatcaatcataaatgcgtgttaacgtctgtgccatatacaaatcataaatgtgtgttccttctcctaatctgtgacgatagccagcagagatccggctcgatcggtgagttatcatatacgctttgatattcaatgtatctgcgatgctatcttagagacgcatacagtttttgtctgttatattggtcggctatttggtattgtgtggtagtggttggcatatcgaaatacccactgcctcacagtcacaggttaaaaactaagacttactggaaatgtctaattagaaggctactctgaacgttccaaaataaattaacttttatatatgaatatgaacataggttatatccagattcagattcaaattcatgtataaaaattgatttttttaagacgtagaggagtacatagatggataggaaaattgttcgtttccattgcaataattgccattgataaaattgaaattgtaataattgaaggcaaaattgaatatcaaagcgtagtacatacgaggaaagggaatattaaaggcaaaatttaagtagtactgtatgcactatttagggcccctttgaatcgaaggattgagaaaacgtaggaataggaaaaatgtaggattttgataggaatgtaagtgtaaaacataggattgcaaaaacgcagtaaaatcacaggaatgactgtttgattgaaccgtaggaaaaacgtaggaattggataagagagatagacttaaaaaaaattaccaagaggttgagggctcctttgaatcataggaatgaaaaaacggaggaataggaaagacataggattctggaaggaatgtaagtgtaaaacagaggatttcgaaacacaggaaaaatacatgaatgattgtttgattggaccacaggaaaaacataggaatcggataagagagatagactcaaaggatttttaccaagaggttggacctcttgctgagtttccttcaaaacctatatgcaataagtcattctataggaattttataggaataggaaaaattcaatcctttgaatcaaagggctacataggaaaatttcctataagatttcaatcctatgaaattccttcataattcctttgattcaaaggggccctgaagctcttgctaaatttcctccaaaatctctataggattgtccattccataggaatttcagaggattggataggattcaatcctttgtttcaaagggcttcttaggaaatttttctataggattgaaatcctccaaaattccatttttctataggattgaaatcctccaaaattcctatatttttcctcaaaatcaatggggcccttagttttatcagggcgacgccagtcatgcatgagtgaactgctactaattagctacaagtacacgacaaagctagatcagttttgctatctaggtcatgcatgcaaatttttcttcttgtataattttcttttacttatatgatttacaatccgatcccactgttatattcgttgcaataaaatctttgttataagatcccaaatgattattttttataaaaaaatgtacgcattaaattacttttatcatatatgtaaattacctttagatctgaataaattaatatttaaacatttatgaaagtaaattcaataaagcataaaattaatttacataaatcataaaagtaacttagtattagaagtaaatccattgtagaggtaaaaatatgagtttatctaaaagttaaatttaatcaacacaaattatgtaattgactaaaaataacaataaaaataaataactcataaaattatgaacagataagaagtaatttaatcaaatataaaagtaatatatatatatatatgctaaaagtaatttacaacttagatatgttattttattagaatataatcatatataatattgttataaagatttaattacaacgaatattagtaatttaaaaggaaattttatttgaaggttagctattgggaattttttcttactaatccatgcttgcatactcccatgtgggaaaggaacgatgcatattaccttttttaccattttctaaactgttagttggttaagattaattagtgcacctgcactaattattaatcatgtccaatatatattaaaccatacaaaaaaatctcaggagactgacttcagcttacacctgacagtcaatcacataagtaaactggagtgaagttaatttacatatatgcacatgaataaagtaatataagtatgttttcttaattaccatgggttgtgcagcgtccggaccaaaattaagtgcgttacagtatatcccactggtcttgttcacatgttcaatttctttcctcagtctgctgatctgcttggtgatggtgtccagtggcaagagcagcttggatttggcacgaggcggcttctccgcacgaaggcaaaactcctggaggtagtcctcgacgtcctgagggaaccgtatcctctaacattacataataatggtatggtgtgacattcctttgatccacatcttccattctaaatcaacggtcatagattatttggtatgcaattaatcaaactaattagtagattatgtagttaaataaattcccgtagaccaaatatattatcaaggaggcaaatatcgctaaatgctacaggaatcggcaagtaactagcacatgacgataattaggtttaacttacctgttagacgcaatgattagcatatgaacctgttaagaaataaatctcgtgcatcaattttatttgtgttgccacatcttccatcagaaagagacaattctcttaatctacaagttggtgagctcatgttaatgaacataaagggactattagtgtaaaaaaatttcctactcattatgtatggtaatgtttaactacataatctgctaattaatttgattacttgtatgccaattaatctatagctattgattaatgttagaggatacggttcccgtcctgagacaggccgcggatgtgtcgcaaccaggttctcaaactcttggagggagtcgtcgtcgtcgtcgtgtggtgggtgtggctacgcttctcggcgtcggcggcatccgccaggaatgactccatgaactcaagatccttcttgatgaaagccacgtcctccgctagcgtgtcggacgccttcttcttgtccctcatccggtgcagctccgtcaacaccagcgcggtcatggctatcgtggcctctaacttccactccaggccgagtaccatttcgattttggtggtgcgtgcgtaatttctctgtcttctgaactgtgcttgtgctcattccagagagatcaggatggcttatatagctgttcgatccgttgatccgttggatatatctctcctctatctctattattataaaagttgaatatgtttttatcggttctttggtacgtcatccgtatatgagtcggtttttaaattcgttcgcttttaaaaatacagatccgtatttgagtagggttttaagtttgttcgcttttagaaatataggagttgtataaaaaatctatttaaaaaaacttgcatgctaacttgacatgattttctagaaaaatatatatccaagcgaattctcactacaataataagattaaaatagccttcatccgttgcaacgcatagaaattttttctagtacgtatatctttatctttacctattataaaaattcaaggtgtttttactgaaaaatttcatacgtcgccccagttggaaatagcgcacctttttttttccaacttgctgcaggaagatgtcatccgtccaacttgctgcttaatgatgacgccttctgaataatttggtctcttgctcgagctggtgtacgtttagtgatcaatcaacttgctctaccacaccatcccaccagtagatcaaactttttttttcaagaatcaatggtaggagttctactctacctgatattaaaagaagaagagaattgaccccgtttataatgaaactggacccaaaaactatacaactgctcagtttactacaggagaacccgcaaaaccccacacagaagacaaagcaaaaagcctgtgacaaaatgactatgaaccatgaaagtgaccgaggaaggagcaagaccttaaaggcgaagcctccaaggagggcagcaatgaaaggagctgctgccaacgcccgcccatgaaccggactgggttttcacccaaagggggagagagtcaacgaggcaacacctccaaggaggatacgtcaccacaggcgtcgatgtcaccgatcttagaataacaagcagggtttttacccaagactccctcgaaaggggcatgacctccaggaaaccaaagtgaaagtgttgagtgttatcattgcctagctcatgggctaaacccgatgtagtatctccgactccgcctaaacacttaaactctagcacaacagagggcaagcacattgctccaaactcggccctacgacaggttcactaagacacagggcacttaaagcaccggcgaggccaaaaagcccggaccacaaacaagctggaccaacttcacggatgaacacttctcctcatccaccggaagactccacgaccatggtctagaagcagtctggccaacataagagaggagcatcaaggaggggaggaggtctggccggtcggaagaggaaccgaaagttgaagacaggtgcatgaaagacatcggtgtcaaccatgtttccgacgagatcctggagaagctctgtggcagaaggcacatctccaccaagggccaccaggcttcgcagcaaatcaccattttacaactgtgacaacaacctccaaccttaccaccagcacagagaggagagcaggggcgaacaaagcagcaaagcaattagcttcaaggaagaagagacgagggaagaagcgagaggaagggaggtggtgctaggtggcagcagaggtgggggtgggggtgggggggagggggagacgcaacgacagtcggaggtcggcgtcgccccgtttgcgccggtgcactggagtcaccgacgtgccccaccgccgacggccgcaccggaaagagcgacggtgggcacggcctcgcgcattcttgcctcgcatgccggctcgcgccacactgcctttgccgctggagagggggtgacggtgggcgccacctcacgtgtgccgccctccgccacctgcgtgcctgcttcgcgagccatcttgcagcggccccctttgtcgtcggccacaccgcctccgtcacgccacgccacggcgccgcctgcttcggtcgaatcgagcctggggcaggccagatccagcgacggcaatcgcggatctgctgccaccttgccgggagagctcgtcgccgccattccccgccgtcggcgttcgccgcctctcacgcgcccgagaggaaacgccaccataggagaaggccccgccgccaccctcctagctcaccgggtagctttccggtggtgagctctggcggcggcgctggttttcgccccccgtatcacctgtgcgtagcgacgcgggggttggtctagtttcataaaacagttttacatataggttgtagactagttgatcaaactggccaagggtgaagccatgatttggatgattgccaacttgtatggggaaatctatgataaaaaaaaagagagataataccattgaacccttccaaaaaaaaacaaactataatgtttttctaaaatacacccctcagcttgaaaccagatgtgaaaactccctcaactatctattataaaaagttagtcggtatagcggaatgacaactaactttcccaatcgcttcaaccattgatcaactcatacatgtcaaatgacaacacaagaacatatgatatttgttgacaacttttagccaatgcatacatccccgagacactgattacgggtgcttcctctccccaacaatcaacatagcacagttagctgctaggagtacatggcctcaccactatcctctccatacgcacctgcgctacattgttgtcactatggttatagtatggcgtctctctctttatttaaaaggtgtcgggttgcaaagtctgatgctaactccatccttaccacctatacaactccaagtccaactgtaacatatttgagaaaattcgattaatagcacaagaaacaagctggtacccaaataatagcaaaaaccttctagctttccatcagaaacacatgccacccttttttcttgtatgcatagcacttccgtcatattttaagcaaacggtgctaggtttgagtagagaaaattttaattggacgaattttcatggttgtcatcatcgccgaggacatagcctggcgtgacagctccatcgtaccgtaactcgacctgtgcgtgcaccgccgagttatatgtggcatacatcctggtgagcccctcagacatgtcgccgggcggtcacggcttgtcctccacgggagcaacgagggtggtgacgacggcggtagaaggatcactcatgacggtgcgcgggacaaacctagcttgatgcactcgatggagtcaatgtgccgtcaacttgtgggtggtgcggcgacacggagaggacatagggcgcgatgagtgcggatgtgatggagccatcgagcacggagggcaaggaaatatcgaaggggtgcttcttagtgaggaagtggagcatctcgtccttcaagcagcccagagtggccttggcgaggttgtgtgcgacctacggctccgccaaaatggtggcgatcttttacgaactagtgggggaattggttcaaactaggaataaaagcgggtcaacctgcgaacctacttatatgttaaataaagggtaatccgcaggttttcacgttatggctcagcttgccgcatcgtagagacgcaagtggatcaacccataaacccatttatttgtcaaattaataggtaacccacgtgtcaacccgcatgttacttactaattttgcctataagcgggtttgtgggttggcccacttgcatccctagttcaaacaggttgggggcaaggaacagtgtaagaaaaagaggagaagacttgggagaggagcgatagtttgggattgagtgattttatgtatttaaaagttgtccggcttctattgcataggagtacttatagattcgtacaccctggcctagcttttacacccattctggcccaattacttgagagctgggccgcttcaaccgaccgccatggccaatacttttgactgggtttgccgccagtgaggtatccttggtagtaatagcagttgtaacattcctctccccttcagaaccatcttgtccccaagctggtgcacccgggaaacgatggcgcaaagccgctgcatcttcacaagttgcttcatcagacgtggctcccgaccaacgcaccttgatttgttccggcaccgctactcctcgcttgcaacgccgacatgccagaacttgaacttgaacatgatcttcatttggcattgtaggaggaagacgaacagtagaaaggtctccaaaagacaaagctttgcaaagctgcgagacatggaccctcaagtggatggagcaagatgcaggcagctggagacgatacgctactgatcccactctggctgtcacctgaaatgtgccaaaataatgaaatgctaatttatggttggtgtgcactgccactgatgattgagcatagggttgggccttgaggaacaaccaatcgcccacaacagacacatgatcagagtgagtcttatcagcttgcggtttcatcctctactaagtgcaattcaaatgctaacacagcaagctagtcactacactcctttctttcatccactcctccagattaggtactgcacaagatcaaatatctaggacccaaaatggcgaggtggatgtccatacagcaactaaaacggcgacgtacccaacacagagggcctgctcggatggcaggtatagcagctgcttgcagccaaccgcgtccagccactgcttctttttgtacttgcttcactgttcctacaggctgtagcgcccttgcagccgaacaggcccagaatgatgggctgtgttataccaaaattccgccaactccaaccatcgataccacctcttcgggtaagcatgcacaaagtagcgcaaaatggtttctaagcattgattgacccgctcagtttgcccatccatttgcgcatgatacgctgagctcatcctctattgagtatcttttaggctgaacaactcagtctagagggtacttgtaaagatatagtcccgatccaacactagcgattgaggtaacccatgaagcttgtagacattagatagatacaccattgcaacatcaaaagctgtaaaggggtgagctaaggcaatgaagtgagaataccgcgaaaatgatccaccaccacaagtatgcaaccatatccgaaagaccgaggcaagccttctataaaattcagtgatagcatctgctacacatgttttgagaccagcaaaggttggagtagacctggatagcgcactcgttcggctttagcttgtttacacatagcataatcttccataaaggagcaaactgttttcatcaacccatgccaagcaaacaatttgcgtacccaactgtattctacttgtataccagaatgacccacgatcacacctgcatgcaaagcctgtaacacccgttgatgcaatgccaaattactgcccaaccaaatgcacccatgaaaatgcaatatgccttctgacagagtgtaactcggtaaggaatctggtttcactaccaattccgaaattaatttggatatgatgggatcctgggtaagctacttgcacctcatacaaccaagctagcacacaaacaaaaatagcagccaattgcaaggggtcacagtttgactggtcacagcgtgataacgcatccattgcatgattctccaaccattttattataaaccaatttgtaaaacaagcccaataactcagtcattgctttttgttaccaaggagtagccaatcttcgataccccaaatgaatcatacttcattgatcagtatggatgataaattctccaaattgcaagtacgacctccactaatccactgccaacagtaactcatgacattccttttcataggtagaaaaatctctattccttggtcccaatgttttactaagaaatgctagaggatgccattcctgcatgaccacaacaccaacaccgtgatcagaagcatccgtctcaaggacaaaagtctttgtaaagtcggtcaaaagcaaagaccggtgtagaggttaaagacaatttcaaaggctcaaacgacgtctgatgtttagttgtccataagaaaactgtatgctttttcaagagatctgtcaagggtcgactaataatgccgaagtgtctgacaaacttgtgataataacctgcgagcccaagaaatccacttacttccttgacattagatggtaccgtctaatttatcactgcctaaatgttcttggggtcagttgaaactccttccccactagtcacatgccccaagtaatcaagcgagattgagcgaaagagcattcggagtgctttacttttaattgatgttctgataataactgcggcacctgacacaacagaacaacatgatcctccaaattgctactatataccagaatattgtcaatgaaggctaacactcccttgcgcagaagaggagcctagatagtgctcaagcccttggaaagttgctggtgccccagtcagaccataagacatcaccttgaactcaaagtctcatccgaatttgatgatagcccgccgtgggatccaaactggtgaagagagatgcccctaccatttcgtccaacaattcatcaataattagcaattgataatgattcttgaccgtgattgcatttagacgacggtaatcaatgcaaaatctccaagtgagctccttcttttgcaccaacaaaactagggaagagaaagaactagagctcggctaaattaccccttgagctaacatttcagcaatttcatgcttaatttcatccttcaaagccagattgtactggtaaggctgtaaattaaccagctactaggctcctagtagtagaggaattgagtggtcaaaaggacaaactagaggcaaaccttttggttcatcgaacactgctgcaaactcttgtaacaactattgaatttctggggaatcaataacctctactgaacataggtcagccacacacaattcaacagtacaaatgatggcatcatgatggaataaacctctgaggtgtacaactgacatcagaggacaatcagatatgttgggtaccacaaatgtgaagcacacagtcttatcgccttgtttgaaagttggaggcttgcccttccaatccactttgattggactatgatctcccaaccaatccatacccaatatcacatcataacaccccaaagatagcaccttcaatgtgatcacacaggatactccttgaacccaccaacaacagtctctgatttccttagtacaacaatagataccaccatctgccactcaaacgcaaataggatttctgctgactgaacaccccccccccccaattttaaagccaactctcacatttacaactctacgagtttctggaaacgaccaacataagtacttcatgctgctgaataataccctgcaacctcaaagttccagacgcctcggtaccctgaactgcttccttggataactaactgagttcaccagacacatgttcttgttcatcatccgacacattaggtcctacgtcaattgcttccccactttgctcaaacaacattttcataagctcctgcacgacatgcagttggaccgtagggccacacttatgtactcaattccacctctcaccacaagtatgacaaaaacccttagcacgacgatatgctcgcacggccaatacttttgacaaggtttgccgctagtgaggtatccttggtagtagtataagttgtaacatgacctcggccataaggtgcgagaaggacttgtgcataacggggttgatgcccatcctggacagcttcttcttcagcttcgtgtttcagtggttcttcatgttgttgcccgtccgcccaagcagtcgcgccatgatcgccgaccatctgcacgcacagatcgcgttgctcaatacacattgccagaaatggaaaaaaaatggcatagagagatcattcgttgcttacctgttgccgacaacggagtggagcttgatggtctactcctctgcgtcggtgaactcgctgtgcttgaggttaagcagcaaatagttggtccaccgtagccgatagcttggtccaagggcaaattggtctttctccatcctaactcactgctacaaacttgacccgaatggcagctgtgatgaaggtgctatgaatcgaagaaaaacaggtggcccatgcttccggtcgaaattggaaattttttgttctgttttttggtatcgttctgttagctgtactatagattgaattttctcaacatattgtaattagtatattcgacacctattctaacactattaatactattcaattttacaccctcggtcacaacgaggtggttttctcacacatgttaatccagtcaacaatttattttttaaaacaacattaaccccacctatcagtataagctcttcttctcgctgttctctctcccgcaatgatctccaaatcgcacgattgcataggggaacacaaacaatatgtgatgggtttggatccttagcacataaataacactactactgaataggcgataggtgccggttttcccaaccaacacctagatagtggcacctttgagtcctcttaaaggtgctggtttaggaaccggcacctttaaggtctcctagatgcaaaagaaaaaagggtcggctcgatgcattggctcggaatcaagccaatgcatcgagtgcgagttccccccgcttcggccccaaaattacccctaaaatcaatcacatcaacaacatcatcatcacataaacacaacaacacaaacacacaaataacataaacacccatagatccacccactgtcgccaatgtcccctccgccagatctgcccgcgggagccgccaacgtcgccaccgctgctggatctgcgcgagaagccgccaccctaggaatgtcggatccgccgctgaagaagcttggggcggagggggatgttgtagaggaccactagatctgcctttcggaaacgctaccgccgccaccttagctagatctgcccgcgggagtgccgatgccactgccgcagccgcgggagaagcttgggcacagagggtgagagggaggggtagaggaccgccgaaaacacctctaccgccggatccatccaccggaaatgacatcatcgccgtcttcgccggatccgccagtgggagctgccgatgccaccatcaccgccaccgccaccgccggatccgcgggagaaccttgcgggcggatggggagggggagggggttgaggagcgcaggatccggcccgcgggacccgccgatgccatcgccgccgcctgctctgctaccggcaagggagagatgagagggagagggggcagggacaagaggggaggagagggagtgaccacgtgagagggtgagagagacgggtgagaggagggggcgagtagataaggatgcccccctcacctcccacgcaacgtctttatccactcgcacccagcccatgggctaaaaaaatggctctctctctcggctcagctcggttcgttttataggtgttagttttaattaaccgacacctataatatattaaaggtatccacctatagtataggtatcttttttatatagtcagttaaagtgccaattttttttttgtactttcagcctatggaggtgggaaaaatacaaaaggtgcttgttccagcacctatagtgccggcatgtgtgtatcttttttttaagtgtaaacggcattggagtcaagtttgtaaacttgtggagaatctctggtgaacctatgaatagcggagctgggccgaagtgagccactcaatatgtaataggtcgtttaatctcacattagtaatggatgatagggaagcaatccgatgtgtaatgggcggtttagcaccacatcggcaattgatgatagagaagcacaacttaatcacattatggaaactttgacatttgaactgaaaatccccatgctatccatcaaatggctacaaaggtacaccttggttgcttccatgatacaagacactcacccacactagtaccgatgcttcttctgcactcgtcgaacggatcccatgatgtaagacacactcacactatgctccttctgtactcattgactcccgttgtgacttgctccatcgatccccatcgacctccatgtgggacgggatgctccccactgcccgagtacaactaacagggggcggaggtactgcaatgattcattgtattcagttggaatacaataaattttctgttgaaatatattacatacatacgtacacacaacttgttctttcacagtggctgtggagtgcatgtgcatctttatctcatgcacctagctcaaaggccaaagcttacgctttcgtacgtagtggtcctttatagtgtttctttcatgcacctggtactaggttcaactgtctcaaccctcacccatttattttgtccttttcggtgtagctttcacaaatactagaaagtaaccacggcttcgcgtggaagtatatgtaggcctgcccaattggatgcagcgtataccctattaattattaagccttatcatcagccaaataagacattaatcttgttctgattggcatatatgctcatattgcaaagcccaaaatccctctgttccccttgggaaaaaaaaactcagttccatgtttaaccatcatgctgttctacagaaatgattcttttccgtttgatggccattttcaacagatagaaatttcagtttatggatggtaaaactattcaggagacagccccagcactgcatgaaatagtgcccaatcgaatcaggaattcaagatccaggaacaaattgtaataacatgttacatgtatatcacaaagtcattgaaatgagtacagtggagtacttcaacatgtaaatagataaagctggcaattgattaatcaatgataattgaacacagtggcgaagacagcgccgggcgaccctgggcaggtgcccgggctccatccaacgcaacactagttacctaattagcatgcatgcttagctaggcaggtgtagcagtagtttgtttattatttgattaccatgcttaacacaatagcaaaacaagtacttgaggattgtcaattttacttctacaccattattctctgtacttgttatacatcgattttttgttagccttgccttaatgcccaggctgaagaaaatttctagatccgccactgattcaacatctaaaaacatctaaactggaactttgtgagagccatctcaatagtagccataactttgcattactacttgagtatagtacttagccatattgtagattattcaatatataaatataaactgtctattatatagtcatacattgttcgggacctgaatcatagcttttgataaagccctatttcaattttctgataaattaagctagctagatgagtataggttttggatcaccacttttctcgatggacatgtaatgcatctgttataaatacaccaaaagttagtgttgtgcataatccatataacaaaagtatgtggtttctatcggatatgttatcaagcagcgcttatttttactgtttgtttgaatcaaatgataatcagtatcttcttcactactactccctccgtttcagattataagatgttttgactttggtcaaagtcaaactactctaaatttgactaattctatagaaaaaattagtaatatttacaactctagcatagtttcattaaatctataattgaataaatgttcataatatttttgacatgggttaaaaatattactattttttttctataaaattagtcaaacttagagtaatttgactttgaccaaagtcaaaacgtcttataaccagaaacggatggagtacttttctgcaataataatagtataattatttatgtaatatattgaatgattatatggttgtcatggaacatctaaagtaaaaaaccaacaaaattaagatagttaagaatcagtgaatcagcatcctttataatagtaaatattgagaaaagcaataatataaataatgagtaaatggtatcataaaacattttattagatggatcacatttgctccaatgtttcagaaaactaatatatgactccaaagtatataaattgtattgtataataaagttcttcagcataatatatttgaactatgtagagaagaaactttttttgctgcaactgatgtttttttttaattttgtaaagatagaggaatcatcctttgtaaagatagaggaatcatcctttgtaaagatagaggaatcaccctttgtaaggtgattaatttgtatccatgttgtttgttttagggataccttcactaaatcagatggtggatgtgatttataataacttaatcagatgcttgtacctaattctaacccgaacaatattttgctggagttttcacgactcaaggacaacaaggttctgccaaacagtgaaatttcataacgctaagattatataaagaatcatcacagcttgcttatgaaagcttcaaatttactttcaatactacaaaatcattccagtgaacacaacaggcaaaccccaaacatcttctctagtctgttactgccatatagttgtagagaacatgcaaggcacacttgtggtataaaaaaaaaaagcttaacatcgttgattcaaagtacaacgtgtcaaatgaatttttttcctttagaccaacaatacaattcttactctagaatataccgttatactctatctcgaataaatgcaatacttactctaggcagcctatacattaccctgctcgatcagtcatgactcaaaattagttccaggtacatgtaattaacgcagctattaatcatgtttgtcattagtaaataaagacaacatcaaccacaatgcttaattacaataagtaaatagcacttttttttagaaaatcaaaaatcaagctattaaataggagtaataattcatcgcaatatctagactaatataaaacgtaagagttgtttagtgcaattaacgctgtaattgcaataagcgccgattaaccctgcatcgccaaatcgccaaaaagaaaagaaaagaaaccgtcgcccagaccgccggcgcctcctcctcctccttccgccgccgcgcctcctcctcccccatcgtccaggtcggcggcgcgccgaggcgaagggtcgaggacggcctccagatcggaaggggacccggcggcggtttggagcagaggttgggcggaggcagcgcagagacggtggcggtcggcggtggagaggcgcagggcgacgggccggccagcggcgtgaaggcgtgctccaggcagagggggcggtgagaccggcgggacgagtaccccgtgcaccggcgtggacggggtcggcgcagggcaacgggccggcggcgtcgacggagtggagatgacagagggcggcgtcgatggggagcgccaggccggcgggaggccgggcggttgagtcggtggccagcggcgggcgcaggtcgacaagtggcgaggtggtgccgatgaccgagtggatctggaggcggacgaagcggcggtgatgtgctctaggcggcaatccgggcggagaggccggttgcgtcggtagagatggctcgacgacgaggaccatgtccgcgacgaccggtggagatgctgctgatgcttgacttgaacaaggaccgagaggccgagatcgatccctctcgacgacgacgacgcagacgaagaaccagccgcttaggagatcgaaacctccatggcgagggtgaagacaacgaaaaaaaggacgaactttggatcaacaaattgtcactttcaagaaattgggctttgctgtcagttaagtaagagactgaatccttaactcagttaaggaaattcagtctgtactctatccttcctctaaaccaggatgtttttttagggtaggctaggtaaggttactgttgtttgaaaggctaatggcgatactgatcgatgttagtcctggatgatggttgaagtctgagcatgtagtggttccccgtttcagggttttgtggtgttgatcttagagggatgccaacagtataaggcagtcacaatggttcatgttattggcacaccaatgcatgcatgcccagttggtggcttggagatggaatgaatatgacgcgtgtttacctggtgctcctgtaacctaaaatccacagttcctggctcatttgcggctgttattgagtgatatataaacattttcttggaagaccttctaattttggtggctttcaaaaattttacattatgctgctgcgaaaattttgtatgcgaagaatagcaaaaattttcatttgctatttcatttatcgcctgcatgtgtcatgatgtaatttgatgtcagtgcagatagttgacaattgattggcatggaggtggagaggaagataaatacaatggttgcccacaatacttctttctaatggtatatatctgctgattacatctgttgattacatgttctagattagcttaccatacgctcagataagttggtttttgtttatcccaatacagagaacatttttttgaatttattattgcctggaatattagtgtttgggaacgtaagctgcctcaagagtcaagatagtgttagtggtttcatgttttgtctctgcacttacactgcagaattactatgatatccagttatcctcttcataagcatagggtaaactaggaaacccggttacagctgcaagtctttgtccaaaaccacctacatattgtcacgcactataggttccattgaaactatatatatacaaggggaagtacttacgtgttttaaagtttaatggatcatttgctctgatatagaacttattgtgatggctacatatttcttccttcgaatgtatatcatatgcaaggtttaaaatctccggctaagccctttagctgctgggcttttcatcagctatggccagctatggccggctatagctgcagttaagccatttagcggatttgcaaaaattgaacataaacttgccaatatcagaataaattcgtgacaacatcagagattcaaaatagttcaaaacacttcaattcttcaacactcgacaacatcaaagcaagaaatcctacctgcctctgactccgctaggacatggtgcctgccgttcgagcttggtgccttggtggcgcttgggggagagaggagtgggccttcagatgcattcgccgccgtcgttgcttggggttgggggaaaagagtggggattggcgcagccatcgctgccttctccgagcgcagctacctccaccacttggggaagaagagtgaggagggagagggatttgtgcagccgccgcctctgataacagcagccgccgttgccggtcgcagccacagcagcatccgccgccgtcgccactgcaggtcgccgccgctgctgctgcaatcacggagaggaggagagagcgagagggttaggttttgttgagcacttgagccacacggtcacctaatatgggcttgttcgttggaatttcagcccaccaaggcctttagcggcagctaatagatggtctgtttagcggcaatcttcaactaaaagcagctaatagcgtcaaagaaaacatagcggtaaattgaacatatcgtagcggttgctattgccagcagctttctccggctatagcggcagctatagccagagatttaaatccttgatcatatgtttgcttttctcctatttgctacaccactattgatggttttaccagatgaaaataattatgcactgtgcactgtgccttctattgagacaaaagaacctctgggaacagaaaccgaagatttgcactagaaatgctcgttggcagatatgttccagataagtggttttctgaagcatttaatatgctacgtctatagaagccccaaatcatgaatacttaggaaaatggaaataaaggctgaacttgctatcccttttactagccaaaaccagtctggtcaagaggaaatccttaattaacagtacaaactgaatccttcctctaaaccaggttatttcagtttctgacttacatgttctattctatttcagttcgtgactgaaacgttggtagaaccctgcacaaataggtggtggcatcttaatagaatgaaaaatgatgggaactccacaacagatttgtcaacacaatcaggttttttcgtttctgccaacgcactaaggtgcagccgggaaggagcatccgatgcagtgggggaacgaggtgacgatcctggtggtcagcgacgacaatcgatgccattattattgcctgctactaagacaaaaattggtgacctgctgattgatgtttctaactttccctcaatcaggtatcagcttcattcattcatggataaaaaatccaatagattgttctccagagtacaaaaatttacagaaaaatgccatagatcactacgtacttatgctaaacgatgtattttcagactggttagagacctggatctgtttatttccttcatttcaggcttcttgctggttcagagccatgtaaaagatcgagttgcttgataaaatgttccactgcttgattttttattattttcagcttggccatattgttttctaagctttgcgagtagctcaaatgaaggccatggtgatctgcttgagcaacatggcaatagtggctggtacaaggtatatgtctatattggtactgttgcggccctattgcctatggagaggggttgatgatagtgaaatttatacattgatcagttttgtgtttctcccgggtgggttatggcagatagatagaaaagatgatggtgaaaattggtacaaaagctacatgcctacatgttcgacgaaatacttcggtatccccgctgtcctaacaagaagaaattttgagcagccattatggtaaatatggtctgtactcaattttttgtgcactgctgcagccacaagatagatgcacatagataagttgctcaatgaaatgtaccattggccctgtaaaaaattgaatggttagaattctataggaacctgaattcaatgttatatgtgattttttttcatgtacattgcgttttgcttgatcaattttattctagaagcatagctcaatttaacatgtgaaatgtataaatgcttcaaacatgttttgactaagataattttgtcaggtgaaatatggaagtgctttaacctgtcaagattataacctaaaaggctgaaagaaatatttttttcccctaggagcaatgttgttcatgctcattttgagattatatcaattatgtggattgtagaccatgtatttctttacactaaatttttttcataggaacaagccattagtggtgataattgatatgttatgtgctaagcatatttggttaactggatgtgtgtgactaaagaaataatgtttattgttttcgaacagagccaaaatgttatgaatatcatatcttttatggcattgacaatggaacgaattatgaactaataatgttagatttatgttcatgaaacatcaattaatgcttttatatgaaagacggagtgaatataagagcattggatgtggaaagcacagcttattgccaggagatgacataatataagtctatgaagaaataggaaagatgcacatggaaagaattactccatacgatgtttgcgcaaccaatatattcaacccctcggtcaattaggttgcattatactaattacatgttggtaaacacgccctctaatggcaccttaatactgtagtgataatgaaggttaacctttcaataatgaactggttccccagttattattcaatgattcatcaatatgtgaaaatgttggacaatgaatggaaatggaaacaaagatacttctacaaattattctattttgatggaagtgcaaaaaagaactgttatgtttctattttgaaattgagatggaaacgacacattctattttttacattaatattttagatggaaacaaacaacatatattagatggatcttaagattctaatttgacacaattgataaatttagcttgaaaatatcataaatggtgaaaaacgtgccttgcacgtgcacgctcactagtatatgaaatatgtgagaactattaaaaagagcaagcgtgtggaattacctggtgcataaaggtgtagttataagggtcatatatatgattctttcgctgaatattccaaattttgaggatacagatcaagtctaccatgacttatttgctgaacataattagaccaccacaccctgcaatgttcactgcagtagaactgtagaagagagaactaaagaggaatcatgatatgttagtatacttttcccagaagatagctacagtttacatgaatattttccttgtctcgtcagtatatttaaaaaagaaatatgtgcagttgtgtaccagataatctgttgtttggatcttcataggtctgtttgctaaagatgtccaaatgacatggctcaacttacatgctctgaatatcttgaggtgactccatttgggaagatgagctctacataaaaaagtaaagtattaaatattatttcatactaacagaaatatttaaaagaaatagggatacttattacctcatgctttattttattggataatatataggcgctaatcttctcatcctgaaatctgatgaacttgtaggtatcattgtgcactggagacagcaataatttttccaataacatctgcaaaaagaaatcaatagaacaagacaatcatgtgaacaaataatatcgagaagcaaaagaaagggcagcacttaaggagggcagtaaataattcatctacagaaatcaatgaccatatggtaattgaatgactttggatgggaacactttcactttctgcattagacactgaaagatcagtaggtacctacaaccaaggtctgtgtacactgtacagtacagtaccatcagaacatgcttgtggtagtcctggatgattttgagcaacagatgaagttttctcaaggttccttgtcaaccgcagttatggtttttcatatattaatgaactcacaggatcagcgaagaacataatcaccgaagaacaattctaattctaggatcagctatggacattaaacaataatcgcttaaaatttgttacattttctagaaccataaaaaatctacattgtgtttgtacccaactgattatgtataggtcatacactcacattcatgtccactctaagggtgtgttaaccgactcacggaaaacggagcggtctgttaacgcgtgcttaattaagtattagctttttttcataaatggattaatttgatttttttaagcaactttcgtatagaaactttttgcaaaaaacacatcgtttagtagtttgaaaagcgtgccgcggaaaacgagggagaggggttaggaaaagggtatctgaacataccctaagcaaccgtcaggggaaggggaagtggactcacgagctggcgaggacgtcaactgagagaggggcgaggggttagagaggcaacgactgcagctatgttgacggcgacggataggattgaccactacgccttgagtacaacatcgaagtccaaccctgataccccgccggccatcccactcgagtgctgcatagggttggaaattttggactgaaatttcagtatatcggtgaccttcaatagaatcggccgaaccgaaaaattaaacccactggtggagaaatgttttttactcccggttggtaaccccctttagtcccggttttccaaccgggtatctttactcccggaggatagcaccacgtctctggtccctatccttctctttttttttcattattctttgcatgttgatttcacaccaatctcaccaaaatcacaaaaccttcacaaatttcaaatcgagatgctccctacatccccaaatcaagtaacaacatcacaaatcataatattcgcatcacatattgtcaaactaaaaaacatcacacattctaaaaaaatttacatcacaaattcatcacagatcacaaatacatcacagatcaaataatacagattcaatgaaacacaaattcttaaaaaaagagagaaaaaatgaaatacgaccgccgctgcatcctgccgcgagctgccgctgccgcttcctgccaccgccgtgggccgccgccgccgcttctcccgtcgcctcgccccactggctcctagccggcgctcctcggcggtacaccgagtggataataccgagagactagagaggagggggaataggaaggtaaggagaggataagagtgagggagagaggaggaggaataggagatcgaaatttttgaggataagagcaagggattatatactgtatattgatttttagtcccggttgagaataacaaccgggactaaagttaaaattttagttccggttgatattacaaaccgggactaaagatctctagggtcctgagagcctttgacacaaggtgaaccgggactaaagatcacatagtccccttacacttataaaccgagtctaaagatactttttagtcctggttttttagtgaaccgagactattgtggattttgggaaaccgaccaaagatagtttctccagtagtgatcgatcctagtgctgcacaaagctcgaccactggcccgccgggtcgagcgcattggaaaggaaggaggcagacagacggaaagggggcgaggaggaggtggcagcgcttggctcgtgagagcctttgacacaaggaggggtgaagtgagggcggcgctgtgggctaggatttcttggggatggggattgccggatcggcgagggtaggcgttggtgccaaagggcgacgagggatggcactggacaaatcggcgagggacagcactggatgaatcagcgagggccaacgttgatgcggagaggcggcggctggccctggagatggcttgcgacttgccggaggagccgaggaggaagaggtgaggagagaccgcaagaggagacgatttctctataaggtatgccaccttttccatttaaccccttggaaatctataatttacagctaggttcattgtttcttctataccgttgatttcttatccaacggatatagacaaatatagtaatatttataatactaaattagtttcatcaaatcaataattgaatatattttcataataaatttgtcttgggttaaaaatgttactaattttttacaaacttagttaaacctaaaacagtttaactttagttaaagtcagaccgtattatgacttgaaaccgagggagtatcattttgggatttgctatccgtcagccggctgtttatttttgtgttatcagctgaattcttggccgtcggatgtgctggttatatagggcccgcactaaaagatccgaactgaacccgtttgcttttttcaaagcccaaaatccagcaagagaagcaaccaagagcagcaagggtgccggtcctcatcggcagtgacgcgcacgcagcgtcccctccggtgttcggcgtcttcacgtcttccccggcgctgggcttctccgaggttagcatcagttctggcggcggacgacgtgcataagtcatcgaggatgttatggcattttttttgttttgcttggtgaagcagcagcatttcccatggctgacggcgaggcaaagctaagcagggccgtttctgccgcagctgatgatgcagggacggctgttcccatggccgccggcaaggcgtcgatggagcgctttctctgattccttgcttggtaatggaattttttcacaatctgcaatccacaataacttcaagttgacatggatattttgagctgcattaaaaaaaacaaaattaactgcttggagaaaaaactgaaaactaaactaggaacattgaaatactctcaaactgaataagtatttgtataatttttggaaaagagtatcacatgtgttgttagacatacattcttgaatgagcataaccgatttttccccaaaagtaactaagaatcattagtattttgaaactactttgaacataataaattcaaatagtaagcacaactaaacaaattgtaagccttcaagcagctatgcaccaaactccagaaatttctttatgaaataaagttgcaatagtgaaataagttatatggtagagcaaaatgttagggtatcaaccaaaatggttcagtttgagtccaacagaaagcgagtttcgtgccctcattgtaaaatcaaatacaaatgttatacttccaatacctgaagaacatttttttttctaaggacggtaaacagcctcaacttttgcaagataaggtgccaggtagatacgatgttacaatttttatttttgaactttgaagaaagatatgtataactaaaaccaagtcataaaacttgattctttatctacaactatatgctttgatatttaataatacccctcaataaaacaacaatcaacaactaaacaccgatagataattcagaaagttctgcactgttcagaatggattaaaaaatcattttttcaattaatgaatgtattgttgacttgaatgacagtgaaggtttaccctccacccgagatgaattcctagagcagctgcatccaaattcttgaaaacttccacaaaataattcagagtaagcgaatcatgtgaccattttaagagcgacttaaaatacagttaaaatgaatacaaaatgttaaaagtatgaataagagcccaggtttaccatgtgcttttacctctctagttgcttataagatcacaaagctttacacatgtagaattgtttttttaaacataatacataagcttattgctatgatggggacctattccctgtgtttaagatattcatcattaaatattataacatcattaaatatgtaagatgatcaataaactggaaaaataaagaagtcaaatattcataacaatacaactccttggtacccacatctctgcagattggataaagagcacaaagattccgctgtagtaaacagtgttcatctgcaaacatttgttgagaagatctcattattgataaggacaatatgaaaaatataagtgttaattttaaaggtctacagttctagaatgaacaaatcagataacataatgcaatatgctatatatcctaagtgtgaggtaataaaaataaatcagataaaaccatggaaacttttgcttgctgagaaaaccaacaattcaaaatagcatccttaagcattcatatcatcaatgatcttgtaaaatgtgaggcacatgattttctagtagcagattataatagaaaagactgttacacatgatgtaagactgcttctttgttaaaaaaaaatgcaaatgttattttgcacatagtaaaaaaaaaggttctagcagttctttatagggataaaaaaaatgaaaaaaactatatttggcagtttttaataaatattttgcactgaagaaaatcatgaagttctacataatttagatcaattaagtagaccaaatacaaattcttcttgttcttcatgaaccacagtgcagtatacatgataaaaccaataaatatttgaactaaaattgacacagctacagtcaacaggtatactaagaacctctctcaccttttccttttgttttccttattgcaacctttgcttaggatctgtctagaccagatcaagagagcaacctagattaatttaacagaaaaacatcccacaactgatgtaacagaaagaataggcaagcagataatccatcattgattaatgtctgaaatcaccatgttcaacctgcaaaaaaaaaatttgtcaacaagaatcggagatttctgaaattaattaccacactggccatcaaagccaactagagattgctaaataaaccagccaccgccaagttgtgtttctgcttctgcaaagtatatatgccaagtaacgcttctgcttctgcaaagtagagggttcctacacaggtgattggtcagctttagggtcattccaaaagactggaatggtgtgtttgagaaggaaaacaaaggactgcaacggttacattttgcctaaattttcagattaaactgcaggttcatcataatagttaatagagaaatcgttattgtaatttacatacagctgttgcaatctacagtctaaagtgagggttcacctgggtgggggcagatcctccaccatagccatgtcgcacaccccagctgtgttcaaagagaggaagcgagtcgccgggcgattgctgagagagcaatcatggtgcaggcaagccggttgagtgggccgggcggccgaagcggccagatccgcgcagcctcgagccctctacggagcagggctttgactccacgctgctcctgccataatacggagtgtccccaatgttccggcttgagaaaatggagacggtgagttgcagatcgagattatgtgtcatcacaatcatgcgagcatcaaggtgcaggtgcagttgctggtggcctgtggttgatgtccgacggtgtcaggagcagagaacggggaggggccagtaggtggagcagatgctggatcggcttggccttcctggcaggggcaacctcaacggaggaaccaatcggatcgactcggactcggcaacaagcgcgaggaaccggcgatgcgatggggtgcgatcggtggggcagaggttgcagcggcggagaaatcacgatggagcagcggatgggcggagaaatcacggtggagtgcgcggctgatggagaagacctcggctccgtgggaggctggggaagacctcgcctccggttcaatccgtggcggcgacggcggagtgtgtggcggcggaagaaggcgacgacctcgagggtagcggtggattgcagcggcggcggcagatgaggacgacgtcggctcctgctgctgccggccgcgacggatggggaagaccacggctccggcggtggctggggaagacctcgcctcggttcagtgtgccgcggcggcggctgcagaatgggacgagacgacgacgcgaggaggagcgaggctcgggttgagagggtgatgaggcgtattctttgcgcggagaccgcgcgtggagagggtgaaatcgtgtggtggagaggggtggatgatatggattacacctgaggtgcgaatgaacggtagggatttaacctgttgatttggcatgtaggattactaggcggtggatttggcatgtagggattttacggaaatgctgttcggcgatcgatcgccctggggatggggcagcgatccacctgatttccttttttggcaccacattacttttctattttagtaaatttatacacctcaagtttacacatccaaagtttagagactaaaagtttataagtcaaaagtttatatatctgattcaaatttgaatttgaattcgaatatttttttatatatagtatttctatacacctaaagtttatacacctaaagttatagacctaaagtttataagtcaaaagtttatatatccgtttcaaatttgaatttgaattatatctgattcaaatttgaatttgaattcaaatattttctatatatagtatttctatacatctaaagtttatagatccaaagtttataagtcaaaagtttacagacccgattcaaatttgaatttgaattatatctgattcaaatttgaatttgaattcaaattttttctatatatagtatttttatacacctaaagtttatagacccaaagtttataagtcaaaagtttacatacccgattcaaatttaaatttgaatttaaattttttatatatagtatttctatacataaatttttctaacttttgtttttttaaaaaaaaagtgtggtgtactgtagtagaaagagaagaaaggaaggaggaagggggagaagagggaggagtatagggggaggggggcaaaccgatcgctgggcgatcgcccaggcgatcgggcggtcgatcgcctattagctccccccccccccccccccccggggagtttagggggaagggatggatgattcagttattgtcgttgtctgattcttcttcaggcttgggcagaagcaaaacagcctataattccttatgattgttctgtcttataccatataggtggttttccattccctatactatgctatatagatagattattgatatcttttttttaaaaaaaattcagtactgaaaaatcatgatgtaatttctcttgaatacagggctctcagtaatttgattttctcaggatgatagctcattggcctttacaattagtaatatcttaagaagagattccagactaataagagctacttagcatacatgcagtttcgtatgattagtttcgttaacacaaattttaatcaggttagttttgatagcaaattttagtcaatagagattagttaatttcttagtgcatttcagttggtaaagatgagctatgatgagcgttgtcaactagctctgagcatgtgaagtttttatgccgggttttcgttaagttcactagtagtactattagcaaacatatttgtgaattattatatttgtcaacaaatttcagagaaaacttgtaatcagaagaaaatacattttttttctggtactatgagtacacatagttttgttagcaatgaagagtatctgttatttttgtcatctactagtctaactacaagagatcttatgatagatgacgcttcacttacgtcacaaatattgaatttttcgtcacgttttgtaatctgtgacgcttgtgtgacgaaaattcattcgtcacctatcatgcatctctaatggggttctatgacgaaaccttattttttcgtcattaatcttgtgacgatacttctgtcgtcataactttgtgacggtcaaattcgtcattatctagcctaaaaaacgtcataaaatatctaagggcccattaaaatccatatattgagcaccctgtttacaggcttagcccaatagcaagcccaactagattttatcctagccccatatatgatgtagcatattttcagtccaattctattatatccattttgctttaaaatcaaataacaaatgggccatgtccattacaaaagcccatatagacccaaacattggacacaccattttcagcccatcatattatattcatttatattagtatcaaataacaagtgtgctaagcccatataggcccaacaatcaaacacaataacaacccatatagcacaacccgacaaacatccaatacaacacaaatcttacaaccaaactaggttcagtcgggtgagcaaaacataacagtaccaccatatcctagatagcaaaacaaagttctacatcactgaccatatctacaaagtccaatcatatcttgcccttcttgtgcaggattatcaatgaacttccatctcagcctagcaataggaagataagaaatcacaaaacacattttattcgcattaatatataattgcaaaagataaaagaaaaatgtaactcacaataacattctttacaggctcattaaaactcgtattgctgttgcaatggcacatcttgaaaagatcaaatgcagtgggtggagcatccttatacttagtttgcttctgaaattaaatgcaaattgtttgtaaatacatgtcatcactctctgacagttttttcatttgcatatttaaaggaaatgcgcgtgaaaggtaaacaacaaacatgacttagctagctctgcagtatatagaagcataccttttcttttttagcatcagcagatacagtttctttcatctacaggaagtgacaacaaatatattagctacatcagtgaaagctgaataaaatgttggcaaacaggaaaatgctggtgtcctacctggctagctgtttctgtggccatggaagaagtgtgaggcagaatgagcttatcagcctatgtgggttgctcacctgaaggttgtccatcagtttggcagccacaaataaaatgaagaatgaaccattatacattggaatgttgtatataatgagaacgatatatgaaaataggcacagcactgaggcatggtattatttccatgtttcttctgccgcatgagaactgaagggcagaaattatatgtatgttgttcagttgttaatagcatttgtatacaaaaggaagaacaaccaagaaggtatagtaagcagaaacagctttttttgtatacaaatgaaagaaggtatagtaaccaagaaggtgtatgatttgcatttgtatacaagactgtttggtgagactatatagtttttggatagttcattaggggcaaaaatggcacttatgcagctgcagcaaatagcatgtaacagcaggggatgtaaatgtatcttaaagctaacaagaagcactatacattggttatgctggatggcataggaacataacgtagatatttgttttgagctagctagatctggaattgtgtaaaaaacaaaatggaagattaaacttatggagttgagctacagtgactaatgtcaggaggttggtaagaaccaggttgtccttttcgtcgatgggaagggatggtccagagtacatcaaggttcaatgtttggctggctcatattaaaattaaatagtaaaatagttcgacaatattgatatttatatacctgaagtttacaaatgagaaatacaatattaatctcttagttttagcagaatacagaacatgtttaggaattactgtatgcactggcatgaatagaagatagaaatgggtgcacaacaggtttgaaaaggcattagcaaattaacttaaaccagaatactaatagtattactaagctagatttcaccatatttattagacaggtatggccacacatcataaatttcattgatacaaccaagctgcagttgtaaacgagggcaaaaaaattaaaaggaacatgagcatctacgcaccgaaactctccaaatgcctctgtgatgcagtgcttcaatccctccttgaaaatttgaaaaatgcaagtagattagaacaaaataatggaacaactgatcataacaaagtcggaggactatatatgttactatgttaccgccaagcacctcatcaagtgcctggctcccagtggtgatccgaacagacttccgcgaaaaataataaactagaaacgcacgaaattgggggagaaaaactagaaacagcctcccgctaatttatctccagaacgcacgaaattgggggagagaaactagaaacatccgaacacgcacagcaaccagaagctgctcgcaagcagacaaaccaaaccaaaccaaaccatccatcattggagagggaaatcgggagggtatgcgacggcgtgaggcatgcatagagaggggatcggcggtggtgggggagtggatggtggcggcggatccaccgctcccgtgcccagcagcggcggagacggatgccggcccggaagccggcgctatcggcggcagatccgccgctcccgagcctggcgacggcggagacggaggcggcgtggtaagcggtgggggagagtaagccggcaccgcgagcggcaatagaggaggaggacgccgccgcacgctgtcatcgcctgtacccaccgccggagaggagaggagagtggatgggacatgggagtgtggcggctgagggtggagagagagagagaggaggaggaggggtggagaggagggttttatatggggctagggttagggactccgatcagaaccattagatcggagatggacggtcagaaatagttgggcaatttgggccgaaacaggaatgactttatggtactttttaattttaatttatgagaactttaaatttaatatttaggctgatttttatgcttcaaatgcaaaaatcataaacaaaaaaattatagaactcatcgagatctacaactattgtattgctacttttcacaaataagttcatttggacaattcaaattttgaattttcaaaatttgataacttcgaacaaaaattgaggttaataaatgattttaaatagaaaagtcaccaaaataaaaattgtagaacacattgttatgcaaaatttttattttggtcatttctccgtctggctctatttgaacaattcaaattttgaaattcaaagtttgagaacttcaaatagaatttttttattagttgacgacttcaaagtcatcgacaaaaaagttgtataatccatctagatctacaatttttattttggtcatttgttcgtccgataaagcgattttaacattgttcacaaattttacatatctcccatatgatttcaattttacatatctcccatatgatttcataattcataagagatgtgtaaattttatgaacaatgttaccatcattttgtcggatgaagaaatgaccaaaataaaatttatagatatttatgaattatataactttgttattgatgacattttcatttgaaatcatttaatatttgaaaatattgtttgaagttgttataatttgaaattcaaattcaaatttttgaaacaaagtcatatagcaaaatgaccaaaacaaaagttatggatcttcataagttatacaactttgttgttgacaattttttcatttgaaataatttactactcgaaaagttatctgaattgagaggagggaagaaaaatagacttctcggcgagggaggagcaaaagagctgggccagcggcccgaagagggaggagggagagagaggcaacgggctatgtgagggagagagtaatacttgggccgaaaaaggcccaaggacagagaggaattttaatttattttttatttattttaataggttaaatgaattttgtggtattaaaattagttatttagctccgaaaattcacagaaaatttcaaagaataatttggaccacgtaaaatattaaaaaaaatatttccggccatgattttttaaggaaaattttagtttcttcattaattcacatgattaaattactttaacttttaatagttcctccatcccataatataaggcgtgcacacatgtcaagattcaacttttcaacatttgaccaacactttgtataatttgaaatgaattttatttgttaaaagttatatcattagattgatatttaaatttactttcatatgattataattttgttgctacaaatcttatagtatatgagaaattataagttaaagattagttttggagaccgtgctatctttgaccgcgccttatattataggatagagggagtatatttttctagaaatgcattatatatatccatgacgtttgctttgtgccccttataacaaattaatattcgtcatgatgtcccattgaaataatttatgacgatttctagttggtattaacgacgaacactttttttcgtcactaagccaccccatctcatactaatcgtcataaaatggaatgtgctaatgacgaatagctccgatgtcacgaggaattcgtcacagaaggtcatatttcttgtaggatcacacatagttctgttatctagtactagctagttttgtcattttgtcatctagtaacactatctaccccagttttgttaaccaaattaattttaggttttgttagcaaattttagtcaatagatgttagttttgttagcagaaggttcatctagcataattagttagtttttgtatttttttagtctttgtattttgtattttgtcagacctttttttcagtttgtcagaatttttttgtcatattatttacatatgtgcatgaaagcaactatgaaatcatattatttaggtggccataacctaattcctacaacattgaatattttgtaactctatgtgttcagttttaaaatgccttgagtaacaacaattctcccctgagcttggcaatagttagtgtacatttcaagttcaactagtagttaagtacttttgctagatgcacctgagagtttgtgtctacataacaaaagaagcaaaaatggacccatcttttcgcttattcacggaataagccaaacaacatatttgcaaacgaaaaataatttgtgaataaaaactttgatatacatgttcttagcgatataaaagcaaaggctaaaaaataacttcgatgaaaaaacctgaaaatcaacaccaaatttaaggttgaaaatgcaaattttagctgataagtataataagcataagaaaaagatgaggtccttatttgcttaattattattgcttatgtcggggtaaaacaagtagagtgccaatcatctaatgcagttatagtcctgccaggagagctactagttgtcaattactgtaaattgacaggatgtagcaagctttcagtcatatagctacttagagtagttacaatagcagactataagcaaactataaacatattttaaagagataaaagaagaaagagaagagcagcaggctatagatttgtagccaactgcagcacggactctaagacgtaatgtgtatatgacaggtgggaccagatattaataatgtagtaagcaactattgcctaaattgactattacattggctatagataatttgtagctagtagttggctatactactaaacatgctctaatcatgtaataaaacatactatactatgtcgagtcagtgttccttgggtgatgatcgatacaaatgtaattagcgagctagaaatacagagcactaaacttttcttaattttgttagcttagttattactgagcttgactacttgttctttggggattgggccgggggacgtttttgtcagtgccatgagttcagaagttttatgatttttgttagtgcttcactagctgcgcaattaaaagtgtatatctgaacatctatcatcgcattaattgtgtcaggttagttctcctgtaggctgtagtgatcttgaaaaaacatctaggggtcctaagtttccagaaaacaaacttccttggaacaacgtaacatcacataggataagcggtttatacattgagtttactaaaagatcacattcttctgcactttccaaataaaatcatcattaatgaccggagagtcgcactgaggcaactctagctagcaaccagatcataccacacgaactaccatttgggaggatctttataacctagctagtaaggacaaagaatatgtatctgtggagcacagtacgtcccggtaaacatctcatttcggagggcggcgcaccacggcgacggcgggacgtacgggccacggacttctgcgaagcaggcgcaccgcagtgacggcaggacagtcggcgttctccgttgaacggaggccgcaggggcagcgcagtccggcgacaatgagatcacgcgcatcgaagcttcgatgcctaacgagcacggccgggttccgatttccgaatgttctcatatatattttgaaattctgttgcatgcatggttgcctgggatgctatatacgactctcttgatctgttgcacttgttattgccagtgctgaagaacttgttgtagtcagtgaatctcttgagttatatgcacatgtgaacttgcactgtgttatattcttgttaattattctaagcagtatgttaaagttaaacatctttactccaaatatgttacactgaaatactgattaatctcgtactaatacattgaaattggtaccattatttaattaggagcacaactaggcaaaatacaatcagacacaatcagtaaggtgtgccacagccatagctaggtctggtccaaccatgatgtccgcaagctaggtcaaaggcaaaactgttatctaaaatgttttctctctccttatactaagatatatagctagctaggtcgagggcaaaaatgttatcgaaaaagctctccctccttagctggacaaaaatactaaagaggtgtttagatccaggagtgttaaattttagcatgtttcatcggatattatgtagggtgtcacatggggtgtttgagcactaatgaaaaaactaattacagaatccgccagcaaaccacgagacgaatttattaagcctaattaatctatcattagcaaatgtttactgttgcacaatattatcaaatcatggagcaattagacttaaaagattcgtctcacaaattagtcgcaatttgttatttttttagcatatatttaatacttcatgcaggtgtttaaatgttcaatgtaacagagtgtaaaattttggggtggaaactaagcaggccctaagataatgcctacattgtttttgacaaatgacacaaaaataatgctttctaaaataatcctagtttaattaatatattgaacccaagcaaaagccaaacaatatatttatgggttaatgccgattggagaaatcgccaacaaaataaagaaatcaatctatgtttgtttttttttcttcgtttacctttatatccatgtgtagatagtagttctttttgccgttgcttgttatatcttacttggaagaatagctggtttcatttctgggttaagtagacttttccattaaaaaataacctaagtcgatcttcgatctatatatgattagtattaataacccatgtgaatgcacatggttatcaatagttgtacatactgaaaatggacttgaaatatgcgggtatactactgagaaacagcaagaaccgggaagaagaaccagcttgatattagttgaaggtaaaaaaaaatgtcctttctctatcttgtttgaaaaaaaaaagaagttccgaaaggtgaaatgaagtctgctttaaaaattctatgtctggtgaatttaatgcggtatatatatatggtctgaaacaacgttcactcaaggaaggaaactgacaattcatatcaaaacagcagtctttgaattgaacatgagtacatgtcactaacatgtggcaatgaaggagaaatcatgccaattactccctccgtttcgaaaaaaacgaatttagaattagatgtgatacattctagtacaacaaatctggacagagatatgtctagattcgtagtactagaatgtgttacatccagtactaaattgattttttatggaacggaaggagtagttcaacaggaacacatagaaccatttcaggttacgctgcagcacgcacgttgctcaattaatgcgactcggcttgggtgacattggctagctatgccccaacgtgacattggataaatctggaccatccggaacaaatccaatggagatgccgcttgggcccacctgcagatgcaaaataatacccaatccatccattcctgcgcgtcacggcgtcccagatccatccatcgcgcgcgcttcgccagttcgcctcccgtcgccgtgagccagctgggagactcgccgccgccgccgtgaccggagagcgccgtgagtggggaggtgaccgggcgagcgccgcgcgaggcgtccgcgctcgcctcgcccgcgttcgtcaccctcacggcggtgcatgggcgatggcggcggtcgccggaggtggaggagaggatgtccagggtgagccagtactcgacgctgtgctgcaggttcaggccgcccgggtagcacggcgcaccgctcgccgatcatgtccggccacgccgcgccggccgccttgccgtcccaccccagcatgccgaagtggaactccggcgggaggtcgtagaggtacaccctcagcagcgtgctctccgcgtcgcacgtcgccgccgccgccgtcgtcgtctctcccgacgacggctgccgggtggtcatcgccgccggagagcccgcctcgacggcgccacgtgacgtcgcgttcccgctgctcgccggcatctccgcttggctgcttctaacaataatgccatcgtcgtcatgctcgccgccggcggtcgccgcgaggacggcgccgtcgatccgcgagctgacgagagcccagcaggagaaggcgaggagggagaccgcgaggaacacaacgtagcggagcgcccgcctccggtgctccgccggcggtgccgccgccggcgatggctgcattttactctccgccaccatccacgacaccagcgcgcgcgagcagcgcaagaaaccagccaaactcaccactggaaatgaaagtcgccaaaaacaaaaaatttcaaaccccgaattacttactgccaaagatcaaatcaaagaaacgagctgctgctccatttcaacaaccccctgcagatcgatcgattgagccgcggtcgtcagttaattcgtcacccaagaacacggattaacttagggactagctatccattacgcgacagatttttgggtccaaatcatacagattttagatagttggattaggctcatttgatcacttgattagaagagtctatacatgtatcaacatatattaattatatatattgcatatattttattcattagatctttacatcgcaaaaaaaaaaaatcaccaactcatctactaaaagttacagtgtaattacactatagttacactgtaattacactatagtagtgtaactatagtgtaattacagtgtaactatattataactatagtgtaattacaatacacttacatgtcatatcaactgaacttacaaatgtaattttaattttagttatatataatactgtaattttatattttaaagaaaataacaaatacacatttacttacacagcatttttaccaaaattacagtgcacttacatatcgcatcaactgaaattacgaattgtaattttagctatataggacttgtaatattttgcactaatcagcgaaatgaaaaaacacatgtttagctaaatcgaatagggaggaggaagcggaatcagtgagaaaacggttccggacacggcgcactaatcaaacaattcgcacggaaacatgggccccacgcggcctcatcgcccccttgcgctctaatcagcacaaatcgcggcgtagatcatacggtcgaaaaaacgtcaaatacgaaggaaaaaaaatcacgcgacaaattaatatatgcaaattcgtaatttaaatctttaaattttaacatcacagcgttggcccgtaatgcatgcatgttaattttcctcacccatcatctgtaggcccatgtgcgaagggtcagctggcccatgaaaacgaacagatctcagagcatatcagtgatatcccacgagaaatctgtcgacagacgtttagcaaaatcacaggttataatgcatccctttgcaaaaccggtgaactcgaggtcccgtggtaatacagtgcccggttttaactgacgtggcagctaagtaagtgtgggatccacatgtcaaggcgattcggtctaaataaaaaaagagagtaaatttcacaaaactacagttattttgcacaatttatcccaaaaccacatatttaagagcttgtttcacaaaactacagatttagtgtctctgtttatcataaatctacaggtacttgcacaatctataacaaaactacatatttaaaaacttatttcacaaaactatagatttagtgtattcatttatcacagaactacacatttagtgtcttcatttatcacaaaactacagatttagtgtgtcctttattacaaaactacgggttttaataatgctaaaacatatagttttgtgataatgaagacactaaacttgtagttttgtgataaatgaagatattaaatctatatttttgtgaaacaaattcttaaacctgtagttttgtgaaacaagttcttaaatctgtagttttgtgatatattgtgcaaagtacatatagttttgtgataaatgaaaacactaaatccgtagttttgtaaaataagttcttaaatttgtagttttgtgatagatcgtgtaaagtctttgtagttttatgaaatttactcaaaaaaattggaggaccccacatgtcagtgacccatcatatccttctccctctctatttttctccacttttttttatcggcgatgttggtggtcgaggaggagggtgtcggcggcacgcagttgcgtggggccatataggaggggaggggcatgaacgggaaagagccagtgaggtcacgatgagcggtgacaaagacaacgctgttgtcgagagcagctcgactgcgaccggacgccttcgtgggaatccttcgtgccatgaccctcgttgactgcatccccaccgtgccgccaagtcacacttctacatcgagctcagctcctccgagaatcctgccacgaccccctccttgccacgcggcactcgcaacgaccccacgcccactgctgaggtgctctgccgtgccatcctggagatacaggcgacactaatggccattgaatagtgctgaaagcttgtgtgtcacggcggtgcacagagcacgcgtcggtgttggcggtgtcgaggtcgtggccgcctatgacaaacggtgctgctccaaggacgccatgttcgagccccactgccttgcaactgctgtcgtcctattgtcttcagggtgccactcctcacaggtgtggtcagcggcagtcaaaagccgtccttcgtgacgtaagatacggccatagactgaataatttatctctaggtggacgagcttttcgatgtcacgagagtggttcagggagcgccgcccaagcgcgctcccgccaatagcactgtcttcatcgccatcgccttggatctcctcaacggctgcttcctggttgcgcccctccacgatagcaaccgttcggtccactggccacccctgtctatgccgcccgtggccgaacgcccttctccctgccccgcaccggatgctagccgtcgtccctatcgacgccgccggtggcatgctgcttgacttggtgaggatggggaacagaggggggtgttgagaggaggaagaaagtgctaaccactaacatgtggggttcgcgtgggtcccacactgactcagcttgctacgtaagctaaaatagggcataatactgcctaggacttttgggtgatccggttttgtaaattgaggtgtccattatatatggtatttcgttttagggatgagtttcagactcggcgataaattgagagatctaaagtgaacttatttctaacctaggttttggcattgccgacaatctggtatggtagcaaatcaaacaagggacaaacccttaggggacaggtgccacctctggcctccgtcctaattcctgttccactccaccaggtttctcatcgtcgccgccgacacagcacgtatcctttgtgttgcttcttccgctcgtcttcttcctctcgtctcatgaaaatcctctaatccaaagaaggaatcgtgtacaagtgaaacgggatattttgtcaaagttaatgggaagaccatcggaggtattttgtcactcatggggtgacttgagtgatcttcaggacatgttgatgtatgataacggcataacgcacatatatgcacgttattgtaagttagaatcaaaatttatagtatataggagtatgtttgtttggtcgatctcgtcaaacacgaaaccctacgaaagacgcatctttccacaccgaaacccagtagaaaatttgggctgttgtatgctacactgtttacaattttcctctcttgaaaatacacatgttgagggtagtagaaagccttgattttgtgacttcactcaaaaagaacatttgatacaacatacatttcctaaattcctgataccaaactcaaaattaaaaaaaccggtcacctaagttataacctctcgatggcaatgtgctcctgcagttctggtgttgtacatgtatttcgtaatattttgcaactgttgaatatactccagttattttcgcaaaaacagttgctgccttttgttgggtagctccaccaggcaaaatatccaatgaagttccattatagttttgttggctatgcaggtctctgtgctgcaaagtgacctctaccgtctgtcccggagatattatgccgactgctggagagacctatattgaatatatgcccacagttttcaaaacattaagctcacaacagtgaattaataatggtgaagaataaaacaagcaaaacaagtaataacaaattctggagtctgcctttactaatgccaacgcgtcaatctactactacctccgtttcaggttataagatgtttttgactttggtcaaagtcaaattacttcaagtttgactaagtttgtagaaaacaataataacattttcaacccaagacaaatttattataaaaatatattcaattattgatttaataaactaatttagtattataaatattactatatttgtctataaacttaatcaaatttgaagtagtttgactttgaccaaagtcaaaacgtcttataacctgaaacggagggagtataactgaaaccatatgctctcttttgtcataactcttgatactgaagagactaatatttctactactctgcagttgtgcccatgtaaaacatgagaaattcggtcgtgcaaagtttttgtacgttgctagtattagattattttaataaaaatacagtaaaaggagtcagacaaagcattgactcacctttagccatgcaggaaaagcagagaaatgtgtgctggacaaatttggtgcttgtccaatgatctcaaaacaagcgatgacttctgttctgttttgcaatttcacaacagatggattccgatcttgcaagatgatgttagaattatttatatttactccagggaatgcttcaagttcctgaagcaaatgcaccactttattatttgagctcattagctccacatatttctgcctcattgtctgtttgtcaacataagcaatatccaaattgaacacagattttataggtttgtgatcactatctgttgcttccatgcaagagtcatacctggaaaacataataacaaggtattgacatattttaagctttttcgggttaaaaaaaaacatgcacaacaaataacttacagtgatattgaagaaaccacaggacaatccaaggaacactcattccctgaactaactcggctatcacgatataggattctgtcacaccaggcaggaatgcgcctcttctcactgctatcataccctatatgacaaataaaggtgatgatctttatatgtactttgggattccacgaataaaaaacaaagtaagatacctgataagcctgctgtatgtttctcaaatttgtatgtagggggaaacttgaaatccccttcacgtagtccctggaagactctcccagatctcatttctgctcgcagttggtcattattttttagccagtcaaagcatctccgggaaactaagcccattgcatcatcataggaaatatcataaaggcggtaattgaagtcaccaagaaagacaatcatgtccgtgtctgacaactcaggcattcttgatccctgtaaattataataggaacaacttagtatatcaagatgagaatctactccctatccaccgagaaaatgtaatgaaccaacattaatacaccatacatttgctcctcgaagaagctggccagtagaactagaaactgcaagaccaccaaaacaagtaacagtgtataagatttgctcattgctgattgtaatatcacaacaaatttacaggtcatttgacttgaatgcccattggaaaatactgaaaaataatgggaaaaggttgaacaaacacctgatgttgtcattattccactcgaaggggtggcaaaggtcattgttctaaagacatggtcaaaatcttcattccgtcgactcacagcttccatatgagcagcaaaatggcaatttacaaagcaaatactcctatcatgtattctcatcctcaatcccactgctccctaatataggcatacatgaacaaagcagcagataagacagaatacagtccttttgaagtaatatctgtactcccccagaaaaataacagaactagtgggtggttacattttaggcccataatgtgttttaaaatttgtcttttttttttcattttctgatcagtattgcacacctctcattcattaattgtatgcacaaaccaccagatatcatcttggtaacaatgatttattggttttgcacaacaactgctaccaaatgaatatggggacaaatgtgaataatctttttgcttagtgcatcgttaacaacttgaactttcagaacttccaagatgttcattttaaacaagtaaacaaacaatgttcaacatgtgaatgcatgaaagaaaacaaatcaaatagcacttgctgtcacactacatttccatcatatagcatatattcctttttattatatactgtatgcctatatggtatatcttatcctccttgctacctttctctagaatgaactaatcagcattgtgcttaaacatgaaagggagttttggcatatagtggccagcaaaggtattcccccccttaactcaaatgttccagaatatgaacacatctccaataaatatgatggctaaagcatgaaatgcttagatcaaaacaaaatttgtcatgatatgtttgataagtcaaatgcctcataaacaacatttcaagctcatcttgcgccaagaaagagtggggcaataagataacagaagtaccttgttgccgattgctcgccctaatccacatgctaccgcagcattatcaatatcaccaatgaactgcttaagatgtgttctgaccctgagaaaaagaagaaactgaataatttatacacaaacaaaaggcagatgaagctgcaggataaaataagtcctgaacagattaccatacacagataagcaatccagccatctgcctcgagccaacacgctcaaaagagtaaccctttaactgctgcccaattgcatccaaccaccaatctccgtttgggcttccctctagcccaacctaaagcaagtggacgtacaaaagtatcaggattagaagtagcaaaaaccatgccagtttcatgttatactttattaatattcttgggaagtctaacggcagaacgatctttagcaagagtgcaagacaaggttaaatcattgtgtcattgagtttcatccatatgctgccactcattgcaaggatggcacatggatcctgtgccaatcagtgttgtattgtagacatttaataaaactgtggcaaaaaatagcttaactctaatcatactgatagagaaaagaggtacagcctgtcaaacaagcgtatttttttgtggtcaagataacattgtacatttgtacaacgaggtatcttatacataatgataatgattattcaacaaaaaaaatcaacaagagcaagatgtctaacaacactcttgttcagtgttactaggatttggtctgtataatagtagcagatgactaagtgcaagtaaataacaaaaacatgtgttcaaataactttaattaaaaaaactagaacttaaacttgacttactgtttctttagctgcagacattgcaagaaaaccagcacccatgtccacctcctgcaatccaactaccactaacccaacctctggtgtcggtaactttagccaagctcttagtgactcataagatgccttttcttgcccgacattccaagaacccaccaacactttcatgtattcaaattgtttgtataatggctcagcctcaatcaaagtagaacgcataatgttgtcaataggccctggagatgacaaattccatccacggactccgccatgaccagccattgtaaagatgtatgaacctccaacagccatactcagaactggactgctatgtgcgatccagcctcctagtaagttaccttccaagtccaacagctgaatactaccatccatgtaaccggcccatattcttgtcccaaagctgaaaatgctttgaacagaacacaaatgatgctgaaactcttgcaaacggttaccgttgccatcccatcgagcaagacatccatttgcagaccctgtccagatcatcccatcaattgacattgctaatgcttctattctttgagaatcatctccaaatcctgctttagcagcaactctccggactgcatcagccgctcccattaaagcatttcgtgatctctggaaaaatccaacaggactgcgagctttatctttccttggagcagagaaaaggttttgctttgtttcatagccaaatggatcctgagaagataagatatcaaaacgagtatcgacttggccatccacgctaatcactttcagaagctccttggtgcaagaatccctatatggcaaaatagacaagaatataacagaaatatacaaacagctggactaatgtcagccaaacgcaacactaacagatgaatggatgcacgaagtgtaccagagtgcaagtgagaggtaaccagcactccatacttttgatctagaattgtcagacaacagaagttttacatctacggcaggcaagggacaggcccctccatcactgaccatggctctaaggtcaatgaatgatctttcaactaaaaaggaggtcttacgcttttcttctctttgtaaagaaagggacttctcaattccttcttcataccaaactttgattactcccccttcagagccagaccacaaatcacctatgatgcatgcaaagagaaaaataatcatttttgcatttaaaagacaacaactatgaaggaaagctgccaaaacacaagcagtgagtctgcaccttaaatgtaaaggctccttaagtgaaaggttcgtgtcttatgagtgtaatttgacgacaatgcattgctgtccacatattaactgcggacaaaaagatatgatatctgtctgttcataccttagtacctaggttttactaaatggaaagaatttaagtccttgtgcattgattgctagaatatattattattacctgcttgaacgttgggcaccatgaaataattatattctagatacgataatgagcaccataaacatgattgctatattctagatgatgttgaagaattatacagtactgtttatggtaattatctcataatcattggatttccatctgtattttacaagaatgccctgcagaacatagatttatatgaagtacatatatctagagagttgagagtaaaaagaatctaagtaacacataatgttgcatcacattaaaaccagaaaaaaggcataaactgtgaaaaagacaaaatcggaagtatataagactgaaactatgagtaagcacaaatacaaacattagtttggagtagaatctcatggtggactgcagaacaaaagaggagagtttacagcaacatctacatggccactagctcagactcctggaatagttttcaatggattgattagttggagctacgatttctacgtacttcatttttgtacagtaaggtatgataaagtgggtccctaatgaggagaaaaactccaccaattggtgttttgtgccatccattacaatctttcttctttctttttgcagaacttttggatttgcattaaacggctgtattgttgtatagttactgcatatatatgataaaatttaacgcatacaacatagttaaggagaattaccatatagagaggtggtcaatgcgaatactggtccacggtgagcttcccaggcaatgcactccccggcctctagtcctcctggatcggcgctccaccccatgatccagccattggcgtggccgctccacacaacgccgcggcaagggtcagccacgaggcacagcgccggctgcgtcctgcgcgactcgcggaacggcgcggcagcctcgtcgccccacctctgccgagacgcgggcgcgcggaaggcgtcggcgaggctccacaccctgacgccggcgtcgccgacggcccacaggtgcgagccggtggccccgtccacggcgatcgcgcggagcgcggcgccagcctgggattccctgggcgggcgcgggcgcaggtcgagcggcggcgggcggtcggcgcgcacggcggcgcgcgggggcgggcgggtcgcggaggaggacgcgggggcggcgaactcctggagggagccggagtggtgcgcccccggtggcgggggccaggcgtcggctgccgccgccgcggccgcggcggagaaggccgggagggagtgggtggggtggaggtggtggagggagccagaggaggaggaggcagaggaggagggggagggggtggaggcgggcgggagggaggaggagcggagggtggggcgcggggaggtggaggggatgggggaagggggagggggagtggaggtggaaggggaaggggaggagatggaggcggagaggaagaagtcgtcggggaggtcgtcccacggggagggggacgcggcggagtcgccgggatccgccattggggggagatcggagaggaagacgaggacgaggtggccggcacaacacaagcaggtaggcgaggaggactcgcagtctcgcgcagcagcaggcagcagtgtgtcgtggactcgtcgtgtgtcgggggggtttgggctgaggctctgggtcgtgcgggggtggtgggccgaccggaccagacgggatagtcgtttactgttgacacgtcctggaaagtggaaacggtatgtctgtctgtcactgcaagcccatgcccgatgcccggcatcgtgcttcgcatgtcctttttctaattttaaggattagaatcaaagttctacttctgttctaaaatatcccttttatattataagactttcttatattattcacatttatatagatttatatgaatttgggcaatgctagaaagttttataatatgaaacagaagaagtaattgattataaacggatgagacttcctaatactacaacttgttcaaatttgtaatagaaagtgtcttattcatttaaattttcttatatttttgatacggagggagagtacaggagtgtatcattcattcaaaatctatatattagaacggagggagtaaatcactacacgagaaacattatacatatatgtgatatctcggtgcaagaaacgactctcacattctgcattctaacgttagtctctaacatatcgacccagacccataagccgtgggcttatgttagagaacgttatattagggatcgagtttcacattttgtgtatatttctaaccaaattcggtcagtggtctccgccaggttcattttggttctggccattgaatggtcaacgaccctattacagtctcttgggcaataatatccaacagagaaattaagaaacaaacgaagttctaaatttacgagtagtatgcagctggaattaatgaaccaaacatcgcgatgtcctaactatcgctcaactatcacttgaattagtgagtccgtttaaaaaattaccctttacattgcataaaagctgtattaccggtagctcagcatgcatagcactacgaaagttttgtagtcttcctgcaccagctgctagcagtacaccattagaatctctagcttgccacacattcccaacctctcccagattagcatctcccacgtatgctccaccacttgttttggttgtgatgtttaactatcagttgtacagtgttgtgaaaatcatctaggtagctgaaaactttgcctgacaattcatttgtagttagtatttattcctcctaaattgacatcattccttgcacccccccattgtaaagaaaacatcactagtatttttaacagctatgaggaggctctattccacaggtcatgaacaaattcatgaaaatttgggtggtcaaccttttggcctaaaaggctaacgcgcgaatgtcctcgctcttcctttttctttctcgcgcgcaacatgactgtttgtccttgttaacacatccaccaaaactttatacacaaattcttttttacatagatactttgtacacacaaactttttctttgacataagatttccaaacaatgcacgaatgtgtccgattatgattcagctctaatttttagcgtaaaagctttatatggataaactttttacgtgaaaacttgaatgtatatgggctgatttttgagtctaactccaaggaaaatttcatataacatgagaaagtgcttccggatgagcaagggaaaaggccaaattagtctctgaacatgtggggctgtgcacgtgggctcggatgactagatgagcaagtaggctgtggagcgcaaacacgtgtgagccttcacatattagactccaccttaggcatgtctaatctgcgaacgtgcttgtgttgcaataagttctattgccacgataattttgtggcagtaaataaatttgtcgtcataaaatacaaacttattaccatggctagcaatgatttcaaaatggttgtaatatgtatctatattgccatgatttttgcagtagcaataaatctgctccaccgtctaaaaaaccagttgattcctgccccaccccacatccaaaaaaaaggtaaacaatcgagagaaaaaaaaaagaaaaatatgggagaagaatgagtttgaaaaaaatacgggataaggagcttggaaaaaggaaaaatgaaaccatgctccctatgtctcatgagaaaaacataggattacacgtcaaattattctgttgtaacgcataggtatttgactagtagtcagcaaaatgttagaatttccacaattagaaatctttcttctctagacaagaggggtgagagcctgatataatcgaagcaaccaaaggtatccgcagtacttcctcaatggcaatttgattgagtaacggtcatgaagccataaacattctatgatgaaggggttctttaagatgctaagtaccctctggctagaagttgaattagacctgtttgctagttcgataaggatcagtaatcaagctgaactgagcgtactgaacgtggacttcccacaatcagatccgtatgtttcttctctaagcaagaggggtgagagcctgatttcatcgaagaaaccattggtatctacagtacctcagtggcaattcgatggattaacaatgtttaaaacctggtcacgaagctgattaattagctctgtccactaggtattttatctttggagcacagtcccggtaaacatctcatttcggagggttttagtgggtagtttgtgtggtatgatctggttactagagttgcctcagtgcgactctctccgatcataacgatgattttatatggaaagtacagaagaatgtgatctttttagtaaactcaaaacaaactgattttaaggaggaaaagtaaagattaccttgatggagggaaaatcacgaatcctggcttatcctctgtgatgttacgttgttccaaggaagtttgttttctggaaacttaggatcttcttacaattaaagtctttctttttatctcaataaaggagtaggcatgtacaatggtgtctaataacgggctctctttgttgtcatgcaagtaaatttggtgacgtgaaagaaagagggggaaggaagaagaaacatcgttgctacgcatgacaacgtctcagagtcaactctaatcatttattaacggaaaatttgttgcatgaaagggtggagaaaaggagagaagtataactaaaaatcatttagtgtattaatggtttagaaatcttattgtccctactattgtaggaggatagtctctagtgacattaattaatatagagagctcatattagactctatctttgtacatgcatactctagtaaggagaaactgtaagggcactaaaaaatgttgtttttgtttggttaataaaaaatgttgtttttgtttggttaagaaaacagtaaagctcttttttttaaaaaaaattactgccttgccagattcatttgaaatgcagttcatctcgttattggaattcaattcccaagtcccaactgatatctgaaagttatgtggatcatgccttaatagtgcccaatctaagctgaaacataccattcgtattagtgggagctgttgggctaggtagttgaataaaaataatgtggtgttttaatgaaacccactctaaatcccttttgcaggtgattttttaaaggtgattttcaagtaatatcatgggagaatgttctggattggtataccgatccatcgtaactaattgtcctactgttttctctactctatccatctatatatatatatatatatatatgtatatatcaatattcgaaatattttttttcttctaaactacttatttgatctatgatccgatcacatgattgtgctcattgtaattaaatctttacaacaatatatcatatgattatattcttgataaaataaaaatatgagttttaaaccattaaaactcaatgtttgatatagtgatatgtttcaatatgcgtctttagtgtgttccacaaaattcacggaaatatgccactactctctctctcatctctctccactccatcaatgcttgcgtgcatgcattttagcgatattcaaaatgatttttttatcctaaactatatatctaatctatgatccgatcacatcattgtattcgttctaattaaatgtttagaataagatatcgtataattatattttgacgaaagaaaaacatatatttcaatccgttaactctcattgtttcatacgtgatagcgatatgtttcagcctgtatcttcactctgtttcacaaaatttttaaaggtttcagttgctaactttcttgtttcaccatatataacttaatcttttatttgttagtcaactgcaacatttaattatttttttttaggaatcgggcacccaatgggtattttctccaatatcatggccttggcagtggttgcttctgcttaaagaagatcgttgaagctactctctcagattttgtagctaaatctaagtggtagtttagagatacttaagatatctatattttagaatagatgaagtataattataatttatgcgcgaagtgggcgcagctcaactagttgggttccttatggtaaaaccagtccatccggttccagtgctcgcactacttactcttttagtggtaggcgatatatcagtcgatagcaagacggctgtgataacttcataaatctcaagatatgtcggtcccttctttgaaggtgctcataggggtaaagtgagtgcccgcgcgttatgagcgtttgcgtttatgtacgtgtttaaaaaagaaaaattaaagtttaggattttccttttttttttctctttcagaatttttgtgacctcaatatgatgagtgagattatgtactcttgggttatttctgtcatttgtgtgtatatctatttgcgtgtagagatcggattgtcttctagtttgggtgtgtttcgttaggcttctcaacctgcttttgcttttgcaaaagccaaaagccaaccaaagggcccaaaaactacagctgcttttacccaaagccagcttttgttgtagtacaaatcaaaagcatctctacccctgctttcacctgcttttgggggaaaaatttacccacctctgccattacggaaaaaaacggttcgctaatctattctcctcgtgtgaatcgcagcagtgggggtcgcggcgggcctgaaggatgctttcaccgccgggtccccccggccggccgaccgccgcccgttcggccccgctcgccgccgcccctgctggtccccgctcgacgccgccaccgctcgtccccgcttagcgccgccccacccgacaccgccgccgcctgacgccgaccgatgccacagccgccagacgccggcccctgctcatccccaaccgacgccgcccccttctcgtcccggccgacatcgtcccctgctcgtccctagctgtcgaaacaagatttcggcaatactaaaaggggtggctatcaagctagaaaggtggatgggtttgaagacaaggaattttatacaggttcagaccttcttaatcaagaagtaataccctactcctgtccggggattgatccgccgagtgtattattgatcgtatgatctgggagaaaatcgtatccctagagggagccggacccctccttatataggggaaggggtccatattacaaaatacagtccatatccctaacggaatatgtgattatagataaaatacaatcgtaaccgattaggatcccgggtatttccttgacatacaagtttagaaactaacccgagtcctcttaaaggtattctatctatatctggtaccccgtacctaaccaaactatacatgccgcatagatatggggtatccataatctccacagtagcccccgagacgtttacagtcgacgaaataaccttctcttggaacataaagcaataatccgagtgcttcaattccttctgctctggcctctcgagtactgaaatcaaagactgtaaagggcgaaaaaagaaataaaaccaggtgcatcgagtagatgcacctaattaggtgtagcccccgactatgtggttagttaaaaaactaaacatgtagtcaagaaccgagtagttttacaaccaaacatcatacagcaaagcatacgcagcgatcaatagaacatccagccgactgctttttagctttaatatatcaagaataaaaaaatataaaaaagcccgagtgataaacactccaaaaggtccataaataaacatatttgacaagaattcgagtaaaactcttaagatgaaccaccaaatatgataagaatcatggtaattaacaagtccaatagcctaggctatgaccctcaccataattaaaataagcatataacatgccaagagaatgaccattagaaaactagtcatctcgaatcaacccaaacagctttggagcctaaaaaagcttacaaaaatagtataacacctttctgtcgggcacctttttatttgcatcatagtcattccaaagaattatctaactgcgtcaaaaaggattttaacagcatcgggtcacactattgtgagcacaaattgccaaggcaaaaatgcctaagcccctagggatcacaacgggccacgctgataatagaattgggctgaagtactgtataggcccaggcccattagtactcccgataccctagcgaaataaacgccaaagtcaagcgtcgtttcgtcttccccgccgagactctcgccactttccccatttcttgctacagtgcagaacttcgccggcgaagctagggttcagcaatccgctccaatccatcctccaaaactacacgaaatccttctgcgcaaccaccgcaccgattccccacccccttccagccatatctcagaccaaattaaacaatccaattcacattcatggcggaagaaagagaaagcttcgagagtcagtgggcgtcctctgatgtaacggaggagaatctgaaagagatggtggcgcacggtgttcttccggcgaaagagatcattgggtggcgaccaacagtcggcgaagcattcccgacccccgacacgcatgaagtcgtggtattctctcatttcttctatggcggattttctcttgcaacctcaagattcttccggggaattctgaatttctatgggattagcctgcatcacttgaacccaaactccatagttcacattgccaattttattcacgcctgcgaagcttttttgggcattagaccacattttgccttgttccgccgcatcttcttcctcaagccccaaccgaacaagaacaaaccatgtgttgttggggggggggggggctggtttccaacttaggggaactttgagccaaaaataattctccatgcccttcaaaacctcaaacaaaggctggcatgcaaattggttttatgttcaaaaccctgagcctgcactccccgagtactcctgtctctctccagtttatcaggacacttggaactcactgccgatgggagatgaagtcgctcaagcactggataaagctaaaggaacaaggtctgcaaggagaacaaatcaccctgcattttatcaagagctggttagctccaattaaagagagatctcgtacagccttcgaatttgacggcaagcatgatccaaaccatgaagatccagattctcttgatttcaaggtcatgaaggagagaatgtacaagatcttctcaaatgctatcgtagtccgctactcacacttgctgccggtggtgccgtacaacgcattcaatcctcctccaccggtatgtattcaaatacctcaacctttctcaaagcatgatcttgtgtcttgttaagtcagttgacaattgaagatattatactcaggagttcgctttgatgaagtcggatcctctaatcgctcagcgtcgatcgcctcgccgtcaaactggtcagggaagtggaggaccaaaaattcggtctgaaacccaaccaaacacctctaatctagctggccagtcagattcccgcaagaggaaattggttctgagtgacgacgaaggcgatgatgctggaaaacttggagataaaggggcgactggaaaactaccgaagcaagccaatccgaagaagaaaacatccagtcgtcctatgccgaaaattaggaagtcttccaggtacaaatcatataacgatcttccttgcattgatgctcacccatcatgaaaataatactgatagcacaactcaaactcgtaggaagccatctgacatagatccttttgggaaagactctgatccgactaacatggagacgggttcctcaaaagaaaccgggccgactgcaaaaaatcatccgagtgacaatcagccggcaaccgacaatgtagaacccagcaacgaacccccgactggaaaccagtcggccgaagctggaaccagagttaaccaggagcccccgactggaaaccagtcggacacagggccaagccaagagatccctaaagttgaagctcaagcagacaaccctcccggaaaggatgccagcaatgacccaggatccagatctcctgtaaaggcacaagagtccactcgtccccgaccggaaatcatcacaggtaaacacattatccgaaatcattttaatccaacagactttattcgattgtttcacctttattcatgtatacattaggaccaatgattggtgatgaagaagaaattctccggatacgagcagctgaagattcgcgccctcccattctggtcaagtggtgggatgacgatatgcaaccttagggaattgtaataaataagcaaaaagaagatgaggaggtatgcctgctgaaaaaggcactcagtcaggctactcgcattgtgaacgtaagtttcttgacgcccgacctcaaccatcttgttcgccatttagttcaagcgctaataaaactgttttgcagaggattcatctcaggaacgaagcaaaaaccgcaaccctggagaaattagttcctcatctcggaacccttgaggccaccagagatcaactacacgaagccaaagaacttgccaggaaaactgagcatgatctgagggatcgaattgctgagctccaggaatccaattttgaaccgagtggttcatcaaaaggtacacacaaactctgtccaactaacttgtggtgccatctttgtaatttcgattaaccagaggcaatatagtgcaagccgccaagatatctcaactggagaagcagattcagactctggaaaatgacaaggcagaactagcaagacagagggactcggctttgaaagatgttgaaggtactagcaatcaatacctcaaaaaccattatcttttttacgctaactcattaatgtgaatatgttggtgcagaccgcaagatcaagtcgcaggctcaattcgacgtcttagtcggcaaaatcaaaaggcttgaaggggccagggatgaagttgctaacgctgctaccctactcgtccaagccatgttcttcaataacaatggtccgagtatattcgatgcttccgaaattttcgataagctgagagttgctccggatacatatttcaagaatatcaaagaagctgggagtatgggagcgagcctggcgttggcaatgaccaagtccccatacccgaagatcgacattgacgccattgatggctttgcagacgggacgagcgaagaagctgctcttgacctcatcaatgatgcgcagaaagccgccgatgagatagcagttaatgtagttgagagattccaggacaccgatcttcgaccgactggtcctgataactctgatgatgaaaaaactgatacttattgatgtaatttgataacaatgattctgatgatgatgatggaggcacaatttgtacaatactgatgaatttatgctgtgctcagtatttcaaacttagcttctgatttcttaaaagcttttgtcaaaccttattgagcctaaaacccgcaaaagctattgaaaaactttcagtcctcattgactaagccaaaaaatcaagcaaggcaatgataaatcaagtaagcaaattgaattgataaagatcacactccattattattatagtagcccccgactggtaacttcaagggaaagcttgatgttagcagtcaagatagggaaatacaaaagtagtacttaagcataaaaacgacgaagatgttcgatattccaagagttgtcgataagagtaccatcttcccgcttgagtcggtaggaacctggccgagtgacttcgaagattataaatggcccttcccataagggggataacttgtgccgatctcgtatagtttgaatttttcttagaaccaggtcgccgactaagaagtctcgtgatcgaacgttacgattatgataacaacgcaacccttgcaagtatcgggccgactgaattaaggctgcttcgcgggcctcttctagtctgtgtagatcatccactcggtcttctccgtagcgctcctcgcgaaagttgtgaaaatgtaaagattcgaattccatttcactaggcaacgttgcttctgctccataaactaggaagaacggtgactagcccgtggcccgactgggagtggtgcgcaaggaccaaagtaccgacggcagctgttctacccacttgccggcatgcatagggattcagttggtcaaaaactcgtgcctttattccttggagtaccatgccattggctcgttcgacttgtccattgctcataggatgcgctacggaggcgtaacagattttaatgccgaagtcttcacagaagtctttaaatactccgccagtgaattgggtgccattatcagtgatgattcgattaggtaccccaaaccgatgcacaatgttgatgaagaaatctctagctttgtctgccgtgattgtgatgaccggtttagcttcaatccacttggagaatttgtcgacagccacaaagagatgattgtaaccgccgactgcctttttaaacgggccgaccatgtcaagcccttaaaccgcaaacgaccaggacaacgggatggtttgcaactcttgggctggcagatgagtttgtctggcaaaaaactgacaaccttcacatgtctgcacaatcttgtcagcatcggacacagctgtaggccagaaaaaaccttgccggtaagccttgccgacaatggtccgcgcagcagcgtgattgccacaaataccagaatgtatatccttcaacaattgtctcccttcctccaaagacacacagcgttgcaggattcccgatggacttttcttgtacagctcggcgtcgtgaatgatatagagcctgctacgcctggagatccgctcggcttcatccttatcttgggggaattcttgtttggtcagaaatcttataaggggctctctccagtcggtttcgatcatacccacgtcttgagtgtccgtggcctcgattgtttctttccttggtatggttggttcataaagatgttcaacaaacacgtcggaaggagcggcttctcgttttgaaccgaagttagcgagtctgtcggctgcttcgttattgtgccgaagaacgtgggtgagttcgagcccatcgaacttgtcttccagcttgcgtacctcttgccgataagcgatcatgttatcatcaaggcaggaccactctttcataacttggttaacgaccaactgagaatctccacgaactatcagacgccgaattcccaaagagattgcaatccttagtccgtgaagaagcgcctcatattccaccacgttgtgagacgcagaaaaatgtatccacaatacgtagctcagtctttcttcagtcggggagatcaaaacgaccccggctccagtgcctgaaagcctcttcgacccgtcaaaatgcatggtccaatactccatcttttccttgggcgtgtcttcttggcactcagtccactcggcgacaaagtcggccaaagcttggtacttgatcaaagttcgcggcttgaaggatatatccaaggacatcaattctaaggcccactttgcgattcatccatttgcttcacgattatgaagtatatccccgagtggaaatgatgtaaccaccgtgaccgagtgactttggaagtagtgagataatttcctgatggtaattaaaacaccatataatagcttttggacctgaggatatcttgtcttggagtcggccaagacctcgctaacgaagtagattggtcgttggactttttgaacatggccttcttcttcacgctcaacaaccaggaccgtgctcacaacctgagaagttgccgacacatacaacaatagcggctcttgcggatgttgtgaggccaaaactagtggagtggtgagaagtttcttgaagtcttcaaaggctttctgtgcttcgggtccccactagaaattatctgttttctttaacagcttggagaagggcatcccccactcaccgagtcgtgaaacgaaccggctgagcactgccatgcaaccagtcagcttttggacatctttctgggagctcggtggtttcatgttgaggatggcgttgattttctccgggttggcctgtatgcctctatgggacatcataaatccaagcagcttccctgacggtactccgaagatgcacttttcaggatttagtttcatcttgaaagcgcggatgctcgcaaaggtttcttctagatctgtaatcaagtcatccttctgcttggtcttgacgactacgtcatccacataagcttcaacgttgcggccgatctgagtcaaaaaacatctctggatcatgcgttggtaagttgctcctgcattcttcaatccgaaaggcatagtgatatagcagtaggccccaaagggcgtgatgaatgaagtcttcaagcagtcggattccttcagtcggatctgatgatatcccgagtagcaatccaaaaaactgagtagctcgcagccggcggtcgagtcgaccacctggtcaatgcgagggaacccgaagggatctttgggacaagacttgttgaggttggtgtaatcgacacacatgcgccattgcccggtcttcttccgaaccaggactgggttagccagccatcgggatgaaggacttctttaatgaagcccgctgctaacagcttggtcaattcctccttgatcgcgtccttcctgtcttgtgcgaagcggcgaagtcgttgtttgatgggtttagcgtcttccttaacatgcaaagagtgctcaatcacctttctaggaataccaggcatatcagatggtttccacgcaaagatatctttattattttgaagaaaggtgatgagcgcgctttcctatttacaatctaactcagtgcctattacagcagttttagtaggatcagaaggatctagaggaattttcttggtcttggcttcgctttctccactctttgagatcttggttgtaggcacttctccttcgcttgccatggttgcagccagtcggatgtcttctcgggcgatcgctatctcgcgggtttgggccatctcgcagcttcccttgtcgcatgtgacggcttgtttgatgtcgctccgcagggatatgactcctcgaggactaggcatcttcatcatcatgtaggtgtagtgcgggacagccataaatttggctaacgccgggcgcccgagtatggcatgatacgctgtctcaaaatcagcaacctcgaagcagacgttctctgtgcggaagttctcccgagtactaaaggtgaccggaagagtgatctggccgagtggcgtggcggataaccctaggatgactccgtggaagggcgcattactcggcttcaactcggtgcgagggatctgcatgtcatccagggacttggcgaagaggatattgagtgcgctgctgccatcgatgagggatctgcgaagcttgacgttgtgaaccactgggtctagtactagggggtaccgccccgggcggaccacttggtttggatgatccgagcagtcaaacttgattgttgtctccgaccaccgaagatattggggcgtatcgagctgaacagcgttaatctcccgttcggtcagcttttgctttcttttagattcataagccatagggccgccaaagatgtgattgagttccttgcgatggtcttgaaaacctgtcggggcatcatcgtcatcatccttctttttcaacgtgctttgatctccatcgaaggtcttccgtgcattcttggcgtattgctctgcaaactgtttgtagacgaagcaatctttggctgcattattggagttgggatgatgcggacattggaagttcatgatcttgtcgaaagtgttgacgcgcgaacattgtcgggaggaatgtgtagtagtcgcaacaagttcctcgggcttatgcttgcggtccttgtggttgttacttccaccccctcccgtagtcggcgcatctttctttggcttccaagtgggacccgactgcttggatgcgataatggcgtctttggctttggcatactcgttggcttttttgaacatctgtttgatcgtcttgggaggtttgtgcccgaacttgccgactagatcttcgtaacgaatccccttgttgaaagcagcgatgatgacgtcgtcggtaatgtcggagatcttgttgcgttgttcagagaagcgtcagatgtaatttcgaagggattctccagacttctgaatgacattgtaaagatcaaactgtgccagggcgttcaaaggtgccctggaaattggcgatgaagtggtcgcggagttccgcccatgatccgatcgtgccacggggtaacccatgaagccaggaccgggcagaatccgctagagccacaggcaagtagttagccatggctttgctgtctcctcctactgcgcgaattgcgagaccgtagacggtgagccaagactccggattagtggtgccgtcatacttctcgattccagtcggcttgaagccggttggccaatccactcgacgcaggtcattagtaaaggcagctactccatccacgtcgtcgtcgtagcgatccggtgaatggcggtgagcgtagcctcgtgctgcacggcgctgattgattgtatcacgaagatcgacggggcgccaacgaggtggggagcgaggccgttcaactcggcgctccctgtgtcgttcgggaggcgaatggacagattgctcgtcgtgacccctactcctgcgattggatcctgcgccggcgatgctgaggcttggctggtgatagtcttgagatcgaagatggggaactcggctgctagtcggcgtgcggatgcttccggagttaaccgggaccgaggcggcaatcatggtcttggtctggttcaagatgttgacgacgtgatcagcttggttgagtgcgtcttctttgaggagggtgtcgaggagagtgatcgccgcaacagcgttctgttgaggggtgcggaagtccgctgtcccttcaacgtcttgctgcccgataagatctcgcgctcgttgccctgcgtccaaggcttgttgtcgtcggtcctcatcctcctttgcagcccgctctcattcttgttgctcatgctgcagccgttcttgctcttgtgcttggcgctcctctttcagtcggcgtcgctcggcctcctgttgtacgcgtcgtgcttccgcttctcggtcttggcgttgttcttccgtctcgttatcggccatgaagacgacgaaatagagaggggtgtaattatcttcaaagctttcgtcgaagtcatcgaggtcgcggttgtcgtagcggtagccgaattcatcatactctacgatctctgttggtcgtgagtcgacgccgggggagctgaagtagccttccaattgatccgtcgaaaccatgccgagtggctggagtatgacgccaacttccctggagctaggccggatcggtgctggagccgagtcccgcctaggcctacggggagaagacgtccttgtggtgaagacgacaaccagatcgtcggggagtttcatcaggattggcgggtaggccccatcatcttgatctggtggtgttggagtagatgggatcttgtccgagtggtttggagccgattcgatcgagataagcttggggtagatcttggccgagttcggaatactgaacggggctgagacctggtctctccctgactggttcgaatttgagtcaaggagagagatcttgccgaagtcgttggtgatgaagtcgaggctgccgaaccggaacgcctgcccgggagggaaggcgcagtcgtcgatgctggagacgaaacccatcgcactagtcggcgaaaaacttaacgctacctctacctggcgcgccaactgtcgaaacaagatttcggcaatactaaaaggggtggctatcaagctagaaaggtggatgggtttgaagacaaggaattttatacaggttcaggccttcttaatcaagaagtaataccctactcctgtccggggattgatccgccgagtgtattattgatcgtatgatctgggagaaaatcgtatccctagagggacccggacccctccttatataggggaaggggtctgtattacaaaatacagtccatattcctaacggaatatgtgattacagataaaatataatcgtaaccgactaggatcctgggtatttctttgacatacaagtttagaaactaacccgagtcctcttaaagatattctatctatatctggcaccccgtacccaaccaaactatacatgccgtgtagatatggggtatccataatctccacactagccaacgccgacccctgctcgtccccagccaccgtcgccgcgtcagggaagtgaggtggtcgacggcggcggcctcctcctcacggcgccgctgcctcctcctcacggcgccgctgccctttcgcccatcggcctccccgcgcgcgtttgcctcctcgccgccgccgcgtgtcctcctcaccgccgccgccgccgacgcaccttcgcccattggcctccccgtgcgcgtctacctcctcgccgtcgctgcgcgtcctcctcctccctgacaccgccgctccctgccgcgcgtcctcctcctcgccgaactgccaccgccgctcctcaccgagccacctccccgccggcgaggccgtcgatggccatggccatctccatctctccctttctttttttttcactgtgtatgacatgtggggcctgtttgtcagcgggattagttattttaaaagccacagctgttgaaccaaatgagcttttttaaatgccacagctcatatttcacaactactttttaaaaagccacagcccacagctacttttttaaaagctacaactcaaccaaacacataaatgatcccaagtgcatgcatccgcgtccaacatctgacaatatgttagcacatttgatgaccaactaaaccaatgcaacgaaattaatcgctaagaaccagattaacaacgaacaaatatcttcttgttcggataattctgttgattaaaaaccgaattacaccaattaaacctccaggacgacacaccaaatttgtctcttgcatcgagtaaagctagccttgcctaaatgaagaacagtgggtactatagcttgaacgggtgtaaccgtgtaaacagtgtcaaaaaacaagatgctgatcaggacgggactcaacccacagtctatgtttaagtccacaacatgtctggacttttcttagttcgtagtaatttcaaagttcccaaatccacaagaaaagtccacttgtgcatagaagtttctaagtttctttttttttaatatagtttctaagagcaagtttaatagtatagcccactactatctccgattcatctatagctaatctaatagctaatttatacaatagttgcttactatactattaatataaggtcccatctgtcatacacacattgcgtcttagagtccgtgctgcagctagctacagaactgtagcttgctactcttctctctcatcttttatctcaattaaatatgtttttagctgactaatagtctgctattgtacctgctctaaagttgcgttcattcagcctcttcctgacccctctccctcgttttccgcgtgcacgcttttcaaactgctaaacggtgcgtttttttaaaaaaaatttatatacgaaagttgcttaaaaaatcaaattaatctattttttttaaaaaatagctaatacttaattaatcacgcgctaatggactgttccgtttttcgtgcttcgaggagatgggttcccaaccctagtaacaaacacagcctaggctgtgttcgggaggaggggttgcacgcaaaacaaagcacctattattgtatgattaattaagtatttgctaattatttttaaaaaatggattaatatgattttttaagcaactttcgtatagatttttttcgcaaaaaacgcaccgtttagcagtttgaaaagcgtgcgcgcgaaaaacgagggagggaggttgggaaagggaggtaatgaacgaatcctaagtggacttagagcaagtataatagtgatttataaacctactataagcttatgtgaaagagagatatacccaaaaaattaagagggttggctcttatgcaagagctagcttaacacaatctccaaaacaaatacattaaatgtataagtgagagataaagagaggagaaaaaaaattatatccaaccttatagctaatctattatatatgttggctttaagatgagctagtagtaggaagtgagctatactactatccttgctcttagaaactatcagcaaagtccacaaagtctaaaagacttagagcaagttcaatagtatagccaactactagttccatttcatctatagccaatttaatagctcattcatacaatagttacatagtactccctccattccaaaatatagggcacaactactttttaaaggtgtttcataatataagacgtgtatgcatgcatggcaattaattagcatctcttctcttctaaattattactttttaaatcatacactcacgagatgtttaattctattgggtgcatgtattgtattaattggattgattcaaacaaagagatgataataattgtttcttggtctttgggttaagggtggttgtgtcttatattttggaatggaggaagtacattattaatatctggtatcacctgtcatacacacactgtgtcttagagtccgtgctacagctggctataaatctgtagctcgctgtttttctctctctttttatttatttttttaaaatatgtttacagctggcttatagcctgctactgtacctgctcttagaaactacctaaaagtgtgcccacccgtgtactttgctgataagggcgtccactatgtgcatgaattggtctcatgttgggtgcagtgtgcaggcgtgcagcaaggaacaatatatcgccgctctagtttccgatcgacgcgcaacgaagactcggcgtcgacgacgtgaggccaaaagtacaaccaccgagtcatatgccggcgaagccggtgacggccggcgtgcgcgagccttcatgcttaagcatgtggccattcccgcgtcgaatctggcatgcatgcatgcaagatttacgatccgatttagggaagctaatttctccctttttctttttttttgacaatttaatcgttttaaaaatcttatttcgaaactaaaccctcactaaaaacttcaaccaaaaattcaacgccaatcccgttgacgctaaggtccaacgtctcatcgccagatagtatggcgctaaaatttgctacgctagcagttatagttgtagacgtggcatggcccatgtgcgtaataagtagatgttgtgctattctttgtcaatatgcagcgtgtcgacgagtgatactcgcggaccggatgatttgggtattggggtacgttggaacagggatctgtgttgtacaacatcaaacaagcaaaagagacaaagattatactggttcaggtccctcgatgggtaatagccctagcctaattagtatgggattatatgagaataccacatattacaaagaagtagacgaaaccgacgattccgacgagatcataatcgacggggatcgacgagatctcacggcgacttggctccgagtactccggcttcgtaaattatggtgggtgtgttggcggttttggtcgatgtcttccaccccgcctaggggtcccttttatagcgtggatcatcttgatctccaagttaaacctggagacattggatctggtacgatataacagaaaccttatcccctccaagtacgaatttggaaatcacttgacttgtggagatatttttttataattatagataaatttccttaacgcatacgagaacaaaccatatacgcgaaggtataccgtatctgtatattccatgagtcgtaggataggagatatgctttatccgtaaccttgacacaacggtttaactgcttatttggttgtcaccaagtcccacgatcgatccccatgtctacactcttttctgtttttttatctatcgcccatagaaaaagtaaaagggtgcaagctccatcaagtgaagggatggtttcaccactatacactacacattacacattactagttgatatcaatatatgggggtcaacgccaaaggcattggtgctgacaccatgccacatcggtgaggggatcggctgcggatccacgtgggtaagggtgtcagcttcaaaggcactagtgctgacccattggaccttagcgccaagggcacttgcactgagcccacgacctatttttggatgatgtttttggcgagagttttgaaataagtttttcgaaaggaccaaattgtcaagaaaaaggtagtttcttctcccttttccttactttaaatattttttcttttaaattatttatctgaattacggattgatccttcagtgtaattaaaactttacaacatgatattacatgattatattatgttaaaagaaaaatatgtgtttcaaaacattaaaactcaatgttttgtatgtgatagcaacatgttttaacgtgtcttgataattatgtttcaccaaagttttaaatgtttgattggctaccatgtataaattaatatttcagcggtgaccaactgaaacatttaacaatctaattttgtttaggaaggtcggggcgtccgatttggagttccgtctcgcatcgacccgcacatggcgcgcgtggacccgagctcttcgctgttggttggagctcgggatccatgcgtgccgtcctaagcccctcgcccattcgctgcctactcgaactggtatggtatgtgcgtaagcacaccagggccgtcgatagggtgggttggagcctgggtggtaggcaacccactaatgtggccaccaaaagtttcaatatagtaacgtgttctaatatgtttcaatatgtttaaagatacatcgctgtatttctaaaagtcttgctttttatccttcactgatttggttagagtggttttgttttcttcagctccgacaagtgttttgatggtataaccattgctatggctcatgacggcggtgtgaacgtgcatttcagtaaagattccatgcttaatactccttacaaataaatcactacatcatgacaactttttacggtgataagtaaaaaaagtgagtctagttagtttgacttataatccatctttgatgaatatatatactagccctaagtaaaacttactcacctatctttttttttatatatttcctatctagacggactcattttctattttgtgccagagcccttatcttaggtatgtatggccctgctatggggtatggggggaggggggcggcaatgggatactattgactgtagatgaaaattcgctagctgccttgcacggttcgattgcgtgacagagaagaggaggagaagaagagcttatactaaggccctgtttttttcagcttgagattattataatctagaatattggaagtaagctgaaagaaacagacaacttattgaagtagcttattataatctggagcccagcttattataatctgataagctcatttaggtgagctttttccagattattgggtgaaaaattacccaccatgccaccccactccctttttagacttgcaaacccaataatctagactctaataatctaggaaagaaacaactaaccgcttattctactacagattataacaatctagtttatagtaatttgactcaataatctagattataataatcccaagctgaaagaaacatggcctaattggagttaatttttttctaggtgaatagctaatttaagctgtgttcgggaacctctcctccccggcacgcaaaacgaagctcgtattattgcatggttaattaagtattaactattttttttgaaaaatagattaatatgattttttaaaacaactttcatatagaaagtttttcataaatcacaccgtttagcagtttgaaaagcgtgcgcgcaaaagacgaggtgggttgggaaaatggggggaagaacacaaccattgtccctcaagtttcaccgaaggctcaatttgattcttcaggtttcactttgtccacgtaggttctctaagtatttgttttggcttaagatcatccttgggcccacttaatatgccatatggatatttctagtcaaaatttctgttagaaaatattccttttgcccttaatttgtatacaactatacaatagaaaagagaaaaccaagatcaacaaacaacattacaaatgtattttccattatttcaacatatccacatgaaacttgagcctaatggcgcctatcgtatgcacttgcaagtatataatttatttttgttttacataacttactatgcattatgtataaaaaaaattcattgcacgcagtttttctcttatatatgtgaatgagggggggtataagtgtcatttatcaagagcgttattggttatgtttagccatgtgactcctaaatgggttcaaagataagtttgtactaaaataaaaatttgaaggactaatatgagcagattgaaacattaaggattaaactgagtctcagatgaaacttgaatcaacataggtatttccttggtggtggcattcttgacaaacatttctagcatacattggtctgagcatacttgaggataagttttgtttactggattatagtagttcactgttataaattcattcacctctatggatacttctccctaatgtcatcagtaaagtccttgaagtttgtcctgccactgtctaccacctcctctattttataggtgaagttctctctactatgatgcccatggagcctgattttcaacaaatatgctgtaccaggatcgatcctatacacgatgcatgcaacaaaattattgcatgccacaaaactacatctcaccagtgctaccaccatatgcaaaaatcagaacaatcataagaggggaaaattttgatacatacaagatttgagaggacattggcttgccttctcaattttctttccattttccttaggtcatcacgtgcacctacctcctctagccgcctgcttactctaggcgccgtaggtccctcgcgactggccgccgcccctctagcgaccggccactgccctcgcctgccgcctgcctgctctgacgtcgcccctcccgtgaccggccgccgcccctcccccgaccggctgccgtcctctcgcaactggtcgccgccctcgcctaccgcatgcgtgctccgacaccaccgcctttgctcaccgcgccgaactgccgcgccacctgctcgggggagtcgtgccacctgctctcctccctctcgtgccatgcctcctcccatcatcctgatctagggttttcccatcttgttgagaaggatgttgggctggagccatgggtggttgggctatattctcaagtttgggccataagctatttttgtcatttctgcaaaaagctgacaagtgattagatcctaacaacagtcaacacacagtcaacagacgggggtggcatgagagggtgcacaaatttggaccaatagcatataggggaagaaccaattttcagtgacatacaagggatcagaccaattttcaatggcatataagggatttttcaaaataatcgggaaggttatttgttgtttcgctatatcaactagtttttataattgatagccaagagaggtttgatatactcgattttcgagttgagggatgcattttaagatagcaatggtaattgggtatttgggaggggtacaatggtattatatcttttttttatcacggtttgtcagcttgtcacaagttggcccacatccaaattcaggcttcgacgctggctagttttatcaactggccagccatgtggtatacatcaagttgatttttttaggtaatggaatagaaatccatcccggcctttgttcaaatgagctacggccaattattacaccaaatcactcaaaacaagtgcaactcaaagagaacttaaaaaactcctccaaacataaagcgaacacaaactcacaaacgccaacacaagataaagagtacacaattattaaattctatttgtgaatctccatctgaagttgacaaaaagctgcataacagtcgtctcaagattacgccatgcagacttcaaaagcttgcagtcttcatcacacttttgtagttgtgcccagaacaggagccaatatgttgccctgaaaaaacctgcatataggacatagatagtgatttgtcaaaaaccgatatcattcctactcaatcatagagcccaaaatataacagatgctcctataagaataagtttactggtttttttatcaacccacacaagccaatttttaaagatatgagatatactatgtgaaaggtataaaccagataaaaactgaacagttctccaaagaaactttgcaaagtgacactccataaaaagatgttgaatagtcttatttttcatacagaaacaacatctcaaaataccattccaatttctcttaactaagttgtcctttatcaacactaccgccttaagcaagtaccacataaaaatcttgatcttatgaggcatcttaagtttgcagacaatattattcttctcaatgtaaccattgtttattaaagctaagtatatcgaacgaacagagaactgaccattttgatgaaaattccatctaaaatatcactttcttctgtcaaatgaatatgaacttttgatgcacataaattatgtcaataaggtagattctgacctactaaatctcttctaaaagaattcataacatttgcaattgaagaatttctccctccagctatagcagataaagacgggatctttaaaggaataattacctatctatctatccaactaaaatctgatttgttcaccattattcactatccaggaacccatgtttaagaaagtagtcttaactttcatgagacccaaccaaaaatgtgaatccccttgtttcctatcaacttgacaaattgattgataattaaaatatttcattttcaataagtccttccaaacaccttgctcatttataaatttaaacaacatttacttaaaagacatttattttgaacttccaaattatgaacaccaaaacccccttgatcgatctttgggttgacatattatgtcccatcttataagtctatacttctttttctttttatgatcatcatcttaccaaaagaaacgtgatctataataatcaatattttgaagaaccccttttggaattaaaaaagatatcataaacataactagacttgaaagcacataattaatcaaaaccaatctccctccttctgacatatgcttgccatttcaactaccaagtttcttttcaattctttcctcaattattttccaatctttgttactaggatacctaacacgaaaagtactaagcttacaataaaaaatattggaatattgttctcgacagtcctgagtctgaccaaaacaaaataattcacttttataaaaatttattttcaggctagataactttccaaaaacagatagtatcaatttaaaattcttagccttctgtaaatcatgctccaagaaaataatagtatcatctgcatattacaaaatagataaaccatcatccactaaatttggaattacgcttcatcttttgccctctgaattaaaatggctagcatatcgaccaccatattaaaaagaattggatactaagggagctttacaagcggcattgcccttcttcactcacgtgatattactctactgtaccagtagtagagtggcttcaatcaaatcgttggtcattaacttttctgccaacgtgatcaccttggataaaagaagcaatccattaattacagcaagttgattgatcacgaaacaccatcttgagcaagactaaattattcagaaggcgtcatcattaagtaacaagttggacagatcttcctgcagccctgctcttcgatcctgatcagcgcgtctctctggaacgagcacaaccagtacagtccacagttcggaagacaaaagaaatacgtatacgtaccaccaccaaaatcgaaatgagcgagggggttgggttagagggtgttgacggaggtgcaccggatgatgtacaagaagaaaggtgtgtccgacacgctcgcggaggacgtggtttccatcaagaaggatgccgcctagaagcgtagccatatccatggactcgtaacgacctagtatgttgtgttgattgattggggagaggcgtttatagtcattgtctcggggatgtatgtttatgctaaatcacatcaacaaatatcatctgttccaattctcaaaaaaaaaaatcatctgttcctatatcgtcatatgatatttgaatggctaaaacaattgtaaaggttagtcgttgttttgttacatcgactagtttttataatagatagtcgagcgaggtttgatacccggttttcaagttgaggggcgtattttaagataaacaggataattgtttatttcggagggtacaacggtatttatctctttcttgtttttttatcacagtttgtcacaagttgccacccccacaattatagatggccaaaaggcccgaggcccgacggcccggcccaagcacggcacggcccgacggaggtcaggcccgtgccggcctggcccgaccaccgggccgtgcctgggcccctccaccggcacgttgggccggcccggcctggcacgatgggccggcagctaggctcgatacacaaaaaaaaataggggagtaaaaatagacatattgtatgccatgaacgaaagaatagggacctaaaatagactttttttatctatacatatgtcagccaaagaggagggacagaaaatagacttattttagctatacatatgtcagcccaaagaggagggatggaaaatagacttattttagctatacatatgaaatagcccaaggaggagggacgaaaaatagacttattttaaaaaagcccgatggaccacccatgccttcgggccggcaccgcacggcccgacagctggtgggccgtgcctgggcgggaggtgcagcccatgggccggcacagcccggcacgaagtgcctatcgggccgtgccggcccaatggctgctgggccgtgcccagccgtgcctgggccgggccgtgccgggcgggccctttggccatctatacccacaatgcttaactgctgggcagttaggtcgagcaagagaccaaattatcgggactatctacaaatcattcgccataaaatgaacccaaatgtagtcggatttttctctactgcgaatccatgcctaacgactcagtggacctccaattacgtacacccttttgcgattaattagggactagtacgtattttattttttaaaccatatgattaataacacataaaaattacaatgtaattattctataactagtaatgtaagtggtatgtaattatagtgtaagtggtatgtaattatattgtaactgtagtggaagtggtatgtaattacgttgtaagtgtagtgtaagtggtaggtaaggatggcgtaagtactgtaagtacctcgtgaatgaattataacatagttttggcattgaaatcattcatcctactatgctcagttggttagtcgctctgtctaagaactagaagaccagatttcgactccccctccactgcgcctaaaattttttcctttacactgacacgaatctcgatgaatatcgtatgggcaacaatttgactgttttttcttagaaaatctggtgacatatttataacaaatccgaattatattcagatcgaaagcattattattataagcagcaagttggagtgaagtttcctgcagcactgctcttttatatggctattttaagttgaactgaagtacgaaacagatatatatataagcgatcgatcctgatcgatcagcgtctctctagcagaatgagcacaagcacagcgtctctctagctagaatgagcacaagcacagtttaattagaagacaaaattagaaacacgtatatatatatatatatatatgtaccaccaccgaaatcgatcgaaatggacaagtgggagttagggctagaggccacgatctgcatagcctcgctggtgttgacggaggtgcaccggatcaggagggacaagaagaaggtgcccgccaacgacacgctggaggaggacgtgggtttcatcaagaaagacttccaactcatggagtcgttcctggcggatgccgccgagaagcgtaggcagacggcggcggcggcgacgacgacctccagtttttatatcaattagtttttataatagatagtcgagagaggttcgataccagttttcaagttgaggggtgtttctaatatagacatgataattgcttattgggagggtacaatggtattatctctttcttttctttatcacagttttgtcagtttgtcacaagttgcccaccccccctcccccttcccctccatgcttcgctgctggctagtctgatcaactggccggtgctgtatagcaagttggttgatcacggaacaccatgcctgagtaaaagaccaaattattctgaaagtaagttggactgactgaagtacgaaacagctatataaacgatcgatcctaatcgatcagcgtctctctggaacgagagcacacaaccacagtttacaagacaaaagaaccacgcatacgcaccacaccaccaccaccaaaaatcgatcgaaatgggcgagtgggagatagggctagaggccacgatcgccatagccacgctggtgttgacggaggtgcaccggatgagggacaagaggaaggtgcccaccgacacgctggaggaggacatggccttcattaagaaggacttccaactcatggagtcgttcctggtggatgccgccgagaagcgtaggcagacggcggcggcggcgacgacgacctccaggagtttgagcacctggttgcgacacctccggggcctgtctcaagacgtcgaggactgcctccaggagttctgcctccatctggagaggccgcctcgcgccaaatccaagctgctcctgccactggacaccatcaccaaacagatcagaagactgaggaacgagattgagcatgtgaacaagagcagtgcgatatactgcaacgcaattaattttggtccggacgctgcgcagcccatggtaagaaacgatatatatatatatatatatatatatatatatatatatatatatatatatatatatatatatatatatatataacacatagcatatattgtatacacaaattactttttggttgtcatcatatatgtaaaataatacttttagatttgattaaattacttcttatatattcataacattgtgagttgcttattttcatcgttaagttggttttagtcaattccatatataatttatgctgattaactttaatatctagataaactcatgttaacagtggcgcagctagggggtgccaaagggtgccaacacccccctatgcaaacactaccaccactacaccccgatataattttactctatattaaggttaactaagataatatttatctagtttattttgtgtagcttgaaagtattatcagtttagttaattagcaagtctacaaatattagcaagaaacatgatctacaaaactagtttgtgatttctcatctttttcaaagtaaaatagatgatacttatttgtgagattattcaatagtttacattaaaagaactagtaatctgcccgtgctaacgctacggtgttataatacatttttgttaacgaattacacgttatttcctccgtttcatattataggactttctagcattgcccacatttatatagatgttaatgaatctagacacgtaatgtgaaatggagggagtagtaaaaatatgtttcctagaatccacccaattgagctttattttgatctaggtcagatattaaggcaaagtacagtgatattatattatctaaaatattaattcaaaaccatcaataatcatatttaatcacttcaataccaatatattagacaatgcacatccacacttccacaaaaaatggttgagaataaattacatgttccaagcaattccacgacttctggatcaataacacacacggagctggcaaaatggagctggaaaaatctagaagtatcacacattgacacaccactacaattataggatagatgaaatgaatacattgtgaaacaacagtcatcacttcttcatttttccatctctatcattcagtcaagcatatttgatcccttctatagatttttatagacttctattttgttatcctctcctgcagtaagctgtgtgcatctttacaaagatcagtgctctcagggtcacttgctttcgtaagacgcaattgcatacgtcttagagtgattgtcaaaataaaagagtttagtaaaaatgttagttagtatcaagcatataaatatatttgtatcaagcatagcagtgcagaatatggtcaagagaataaatatatttgtatcaagcatagcagtgcagaatatggtcaagagaataaatcagggatcatgaacagttcaaaatgtgccatcaatggggctatcctatatttcctgaaagagtcatccactgtttttcctttttgatagcagtcaatgacacaacgataaaatgttcaatgagataaaaaagtaccaataggattaaactgtttttttaccatcatgtttttacagtgagtaacgagaccaaaactccaattggttaattagtacgtaccaattagagaaatcttcaaaaaatgaaccaaaactccaattggttaattagtacgtaccaattagagaaatcttcaaaaaatgaaccaaaactccccgcgattaccttccacaattccaccttttcttctctacacaagcctgaaacagagtaaacatttgttttcacatggaaaaaattccatcaagcagttggccataatgagaaagagcatccaatcaagctatgtatcatttttgcactgcactaaatatcagagatttgcagcatttttcactgcactaaatatcagtaatgtaaaatattattaaaaaggaagcttaacataaacttgttagtttttctttgaatgaataaacttgttagttcttacgtacatactacatacgaacgaaaataagggaggaccagatgtgcattcagtgatggtggcattcatgaacctgagcagtttaaaaatgaagaaatatacatcgcttcagaagcaccagaaaataagatagaatgaacctgagcagtttaaaagtaaacattgcacatggtacaaaagcagaaatcaattaatttccgggagatataatgagcattgcacaaagcaatggttgaaaggcattataatcatacagtccattttgtcagatatttttaatacatacacatatttgtctatacgatatataattctaatcatggaagtgtatatttcatcgtcgataattaactcacttttccttaaactaactctagaaaatcccaataattaagaatctaatcagaatctgcttgcaagtatttgggtttttcattaaccaatcaaccaatcgcagcagaggaaatttagggggagaggataaaccaaggcaatttccgacttaccttctgcgccttaccacgatgcgaacaaatcgattcgtcaactacagtacaacactaactacctcatcctgatgaaggcatgaaacagagaagagaatctgaatttattcagacattaaacatctgatttttttttcataaattcacaaataaactggtaagttgttcctttagagtttagacaatacattgaaagtgcttgcacattactaatgcatggcattttacatattcaggtgtcatgaataaaaatgtaaaccaaatttgactttttaaagggaaaaattatcactgcattccatgtggttcaatagagcacaattccacaattgaagtaaaatctcattatgtatataacctttcggtacacatcacagaaaatgtatacaacggaaagtaaaagaagctctcaatattggcatcatgatttagataattaaattcttcttttaacttggatgtcaatttggatgttgatctcttaagagagcacacaacatgtctatcaatttaattggtttcctgggttatgttgttgaccaagcaatgaagttcaaaagaaattatctaaattttcagatataaacatcccaataatgacttaccttgttggcgagcggatcgcagcctgtgcgaggccagtgccggggttgagaaatccgaccaccgggacttggaatctcgaactcgcacgcggccagaggaaggggctggtgccgggatcaaccacgaaaacagggcggcatcactaaggccagatcggagcaagagggaggagcgctaaaaatcaaatggaagacatcaaacccaaatcgtgcttataacttatttaaactgtataactacgagaatccagtttgtgagtattttttaagctctgttgaacacatgataacatcataatattgtattcacatcatcacaatacatgatctatttaaattgagaaaataatttacagaaccaaaagctagtctgcacctgaattgccagcatcacttgtttcaatcccacataacagaatgaccagcacgcatgtttattgtactataaaaatttacaccctacttatcaaaacccaagacatcataacctactctcattcttcagtaaaattagcaaccagaaattaaatgggcatcccacaaaggaatttaaccttctcacatcacaagaacatgcatataatttcatatacaaaaattgcaaaatattatatccatgtgaattaaattcattcttccaatatagcaagcaaggtgtacacctcagaacaagtaaaaatgagtgtaacacatcaacagaggcgacttatcaccatattgggttcaggaatgatctcctctagatggtagattgtctaacattagtcaattgacgggtgacttcagagggaattcatctgaaacaaaaggctgttggctcttgttaaattctccattgttgttctgatggtatttgcagccgcaaccaactaaaatattccctaattgctccttgagcaaacaactcccaatccaatccacagaacattcaatcctgaccaagcgattgtgatgggacactaactgagcagatgaattatagaactaagtaacagagtacataattaaatttgagggaaaagggatacactcacacgcttgcgtcctcacggccgaggagcttgaccggagttcttgtcttcggcgacattacctgagacgccgggagctcgtcgggcccgagtatcctccaaggccaccatgacccgttccgtcgccggggatcatcgtgtgggtgcggtgacggaacggtgacgtaaatcctggatgacgacggatgcgacgacggtgatggggattggttgagggcgagccggcagcggggatcggtggcggcgagacgacggatgcgacgaaggcggagcggcggcagtcgagggtggcggcgacgacggatgtgacgacggcggagcagcggcagtcgagggcggcggcgacgacgacgacggatgcgacgatgggtgacggcgaagtggaggcagtcgcgggcggcggcgacggtggtggcgcggggatcggtggcggcgagacgacggatgcgacgacggcggagctgcggtagtcgagggcggcaacgacggcggtggcgccgcgtgagagggagagattagggttggggaggggcggggacgcgtgagagcgagagaaagggggcggagaggatggcgcggtggagaggtggagacgatgctgagcgttggattttacacatagatgatttagaccgttccatgagtaacgaaagaacgagtgatgagtgatgagtgaaacaatttgttgaactatagggtagatttagcaataaaaattagtttcaaacttccaataatattattaaagagctaaaattaaagtttttcttaaaggactagtttacgcattacttgttattgacggtgactatttgacctcctttgctattaataatagttgttcggtctcatggtttatcttcacccccacacctctctaatctcaaatcctggcttcgcccctgcatgttaatacccctgcaatggatttacttcaaatgccgtgacaacttacttctattttgtactaagttacttttataatttatgtaaattaattttgggatttattagatttactttcataaatgctataaaattaatttacatatatgataaaagtaattaaaaaatacatgtattttatcataatataatcatatcaaatcttgttataaagattttagtgtagtaataacaacgacataatcggatcataaatcggataagtattttaagagaaaattctataagaagaaaaaataacatgcatgacctagatagcaaaatagatcttgaacacttgtcatgtaattgtagttctcttaccgaaaaagctatttcgtgggcgtctgcgtgcccctccccccgtgcagagaggggaagggcggcggacggtgcgagtcggtttccttcccttttttctttccatttccttccgttttttctttctgtcttttccgattttttttccaatttttcccatgtttttctttcccttttttctggttttttaaatacgtatgtatataaactttgtatacgtgtattttattttctttacatatataatctttatatatatgcatatacaaaattggtatattttgtatgggtacctagacaatcttcatatacgggtatatatatttttatatattgaagtgtgtacatataaaaaaatctacatatatttgtatttatacgtatgtatataaatatatatacatatgtataagcttatatacatgtatacaaagtttatacgtatgtatatattgtatacacaaacgtatatacacaaatacagtagaggagataagactaaggggcgcagctgatcacacggccacacgcatgaccagtcgcgtatcaacgccccctgttccttcacgcatggccggtatcgcccgataaaaccaaataagtgcatgcttactatttaaatgttaccctaatattcagtatgtggtaaaaaacatcaattattacaatttaaattttattaatggaaattattgcaatggaaaggaaccattttcctatccatctatacgtagtagtatacgtactccctttatgcctaaaaaagatcaacttttttactttaatctgaatctggatatagcctatgcttaaacttatatacataagttaatttattttgggatggagagagaagtttgctaattagacataatttttaacctgtggctctgaggcagtgtggtattttgatatgtgccaaccactaccacacaatataacaaaaaggcaaccaattaatatagcagacaaaaactgtatgccgcttcgagatgacatcacagacgcattcagtaccatgataactcaccggttcgaggccggacctttgctggctatcatcacagattagaacaagaacacgcatttatgatatatgacgataacacatatttgtgattgaggtccattatgagagacacggttaaacaaaaagtgtcaatgacatgtttcacaaatgcctgatacatctgcatctcttatcatagatatggacatggaaggcaaacaatgcatgtgatctttgctctaatcgtagacacggatggtaaaaaaaaaggagtatgtgatttcagcaaaggtcacagtcggttgtggaaaccatgtctatgaccattgctaatggggactacctatatataagcaatgtctttgtaatgatatgaacgcgtatgggaaagaagtgattattgcaaaattcacaaacgcggatgggaagacctggtccacatcctggaggcttatgttctatgcttgtgataagtccacttcatagatgcgcagatccaaatacgtgggtgtcccatatctgtgattgatgatcctatggcagtgaactgccacaaagatagaatggtctaataaaggtcaagatttagaaataggttaaaacaaggctcttgttcaaaacgaacaaatgttaataagagggtttaattattaaattatattactcttaatagccaagaagcaatgacaaattaagctgttaccctcattaaagtacatccaattgttttttcaaagcagttattatctccaattagttgagaatagccaatgtggatgtattaatgtgtggttgcattaggcctgtttgttccagcttaagattattgaatctagattattgagctagattattataagttggattataataagccgacatagaataagttgttagatgtttgtttctcagttgtttgttagctgttagccacccaataatataaaaaaacacctttaagagtggattaccatatatattaatatatattatagtaatttggcttatagattataataatctaacataataagctatctgtttgtttcagtttactcctaataatccagattataataatcctaagctgaatcaatcagggccttaataaagggttgggagagaagttaatctctaaaagtgttttctaatatgcgaatggcaattaatttggtaagagtacaaaatttgagtcctagaacggaagtaattgaaacatgtagattacattatttttttaaaaaataattaatcattattattttgatacacttatctttaatgaagaggttagatgaagcactacaaagataattcccctgccacattgtatatgcttctcttaataatgttatttctttttttcagtcaatctcagtaccaacaggacccgcttttaggaatgctccacacatcggacgagaaatggaaaaatctcacctcatccaacttgtttctcaggacggcgagaatcatcacattatctccatatggggaatgattggtgttggcaaaacatccttcattaggagtgtctatgaaagcgaagaaatcactagcatgtttgagcagtgtgcctgggtcactgtatcacatccttttaaccttcataatttcattacgagcttagcccatgaattagattcaaacgattttagtgttcttggaaatggcttgcagaagagtgaagaatcaatcaaggcttcaaagaggagatgcctccttgtccttgatgatgtatcatctattgaagaatggagcttgataaaaccacatttgcctagtgaaacaaacacaaagatcatagtcaccacgagagaagcaagtattgctgagcattgctcgatgacatgcaaaaacatatataagctggaaggtcttaaagaagatgcggcacttgcactcttcaagaacaaggcattcctactagtcctaaaaagaattttgcttttttatgcttggcaatcaaacttctgagcattaaatgtttttatataggtaattaagtgttaattatctataaaaaaattgtttactgaccaagagaaaatgaacagtactcatgattaaaaattatttcataaaactgtggatattgagttttttggttaagattccttcatatagtactttaactttttccagttatctgtcaaagttatatatggagatctcactatactatttgaatattcactgtggcttatgagcattgatgtcggcatttgttaatgtgtgccaatgctagtctgcgcatatgagaacccctttaaattttgtttgggatatttcatcatgttcttgttctgtagcaactcttttgtaattagttgtttttttagaaacaatctaccacatccacattacatttgtgtatgttgacaatcttctcataacaactgtaggtatttgtagatggttcaaatattgatttggatcttgacatgactactcaagcaaaactcatcataaaggagtgtgatggccatccccttgcaataaccaatattgttggtttcttggcaagaaagcaaaaaacagctacggaatggaagaagttgaatgatgattttagttcagggtcagtgagcaaagaaaatcttgaaatgataagtacaggccttgaaccatcctatgatgacttctcctatcatctaaagttatgccttctgtacttatctgtttttcccaaaggccataatattaggcgcaaacgcatagtaagacgttgagctgcagaaggttatataagtaagactcatagcttgagtgcagaagaagttggtgagagctattttgcagagcttatcaatagaagcatcattcaaccatcagaaccaatacctcacaatgctggcaatattgaatattgtcgagtacataatcttatgcacaagattagtgtttcaaaatccatggaagaaaatcatggctttgtacttgaagttagctctaataatgaaggtatagtacgaaatttatctataatcaacgttggtgagacaaacaagaacgtattgaagtgtgttgacctaacccatgtacgattagtgactatatttggagagtggagagcatctttagattttagaaagatgaggatgcttcggattcttgatttggagggcacatctggtttgaaagatcgtgacctgagtcaaattggcaattttcttcacctcaggtatctttcattaagaggatgtgctgatatctatcatctaccaaattcattgggcaacttgtgggacatccaggtgttagatgtcagcggcacaagtatcatcaagctaccaaagaccatcaccaagctaaagaagctccactaccttcgtgccggcaatataccaaaggatgatgacacctcttctatagagttgaaagaatcatgtgatctttcaaaaatggagcacgagccaattgatgatttggaaataccagatgttgaagccaaatcaacgttggtgagacaaacaagaacgtattgaagtgtgttgacctaacccatgtatgatcagtgactatatttggagagtggagagcatctttagattttagaaagatgaggatgcttcggattcttgatttggagggcacatctggtttgaaagatcgtgacctgagtcaaattggcaattttcttcacctcaggtatctttcattgagaggatgtgctgatatctatcatctaccaaattcattgggcaacttgtgggacatccaggtgttagatgtcagcggcacaagtatcatcaagctaccaaagatcatcaccaagctaaagaagctccactaccttcgtgctggcaatataccaaaggatgatgccacctcttctatagagttgaaagaatcaagtgatctttcgaaaatggagcacgagccaattgatgatttggaaataccagatgttgaagccaaatcagttcaatttggcatggaggtattggacaggacaacatcttattgcacaataacaatgcaaaatactgactatgtaaagaagcgtgacatattccacaaatattgcaaggtcttgttacctagtattctacaggaacttgatatgtatggtgttaaagcacctaaagggattggccaactgaatgacctgcacacacttggtgttgttaacgttgtaaccgggaaagtcatattacgtgagcttgaaaaacttaaaaaactacataagttaggattgatgggtatcaataagaaaaatagccaagttgtcctatctgtcattgcaaaccttgccctcttacactcattatcattgcaagcagagggggaaccaggtttacaaggttgtttggatcacacattcgcacctctaagtaagcttcaaagcctcaagatttatggaaatctagttacactgccaacatggatcacccaaattcagaatttgactaagctgaagctacggagcacccagttgaagctggatcttttcttggaagtccttgggaagctaccgcatttggccattttgcgactatggatgaactcttttcagagcaaagaactctgtttcaattttcagcaagggactttcctgagtcttgtagtgatggagctgaaagatcaaggaggcctcaagtcattaaccttcatgcaaggagcgatgccaaggcttgagttgctgcagatcgataattgtatacacattgacgaaaatgggctttctggtgtgtcatctcttccaagcctgagagaagttatgctcaagggtgaccacaacgaagaactcatgaagaacctgtgtgaccagatcactctgaatcaaaaccaaccagttctaaagggggcatgaccgcatatgagctgaatgatggattggtttctattgttgtttgtgtttccatttcatgtatcttatattttttgctcatttcccttcatgctttttgtttccttagagattaatcagttcaggtcacgtgtgctgttgctgttgcataattctgaacgcaaattaagtgtgtgtgctggacgtgctacaccatgtgggcgagttaatttcatgagttgtggagttcatgtgtttgtgagtgtggggtcgggaggctactaaggccatctctagtttgtactttgttttatatgcataaagaaaaacagaaaacgctgtgcttgttaaggcagcaccaaattatctgtcccctctgtttctcttctctttggcattttgtggagctcttccttgttcattaggttgaaggtgttcggcagggggtttgggatgagctcaactgctcaagaggtgccccgagcaacatgcacgatgttgggtaacctgagatgtttatgtgtgttcccatcaaaataattagcattatttcttctgtattgccacatgttagtgaagctattttagattatatagactttattaaacgtgttggaacttaagttttaaaatagagaaagtttgatagacttcatttctccttttcggagttattttctaacaagatagagaaaggtagattttcacccaggaaaagttagtttcaaactttcaattaatgacaagttgaagactgtttcaattagggaaaaagtcagttatacatattccaaaacatccaaaaaaaactttaaaaccaaagctcttcttgggcaacgctctggtgctctctactcgtagtattatactaccagtagaaataatgtcaaccgtttgtttttaagggcaaattagtaatgtactaatacaaattaggggtaactttgtaatttcttttttaccatctcggtcggtctgtaggtttgtcagtccccatcatcgagaccacggaaaagcaaaaaaggaaaatgcgtcatgtcgacgtttgatgtcacgactacggtatttggatagtatggggatcgttggtgctaggatatacgcgagactgaggtaaaagagatagagacagggatttatatacaggttcaggcctctgaattgtcaggtaataaccctacatcctgttggccggagccggtattgcttttattcatgataatcacaccagtacaatatttgaggtagcctatctaactgttgtcgacatggcggtttgacgatctgactcgtagtcgataacagggtagccttcctcctcgaatctgtgcttggcgagatcagagatagcgctttcatctctcctgacagtatccggagacaccgtagggtactagccgtgcttatccctgaagtcgatatccggcggcgtgtcttggcgcatgtaggcttttatgttgtggcttctatgtcgattgtgttgagtgttgatcatgttccctctcctcctaggggggcttgtatttatacctatatgtgtccccttgtccaagtagaactagggaaactaatatggatacaatccttgtccttgtcgtttccatgtagaactctggttgtcttttcttatctggaactccctcgagatcagttttcgtataagacatggtatgtggtggatcctgccgagatttagtcaactactattaggtcgcgcttgtggatcgcgcgcgtcctcccgtcggcgtcgcgtgtggattgggatttgggagtcctcccgccgacggtggaacaccccagaccctctctgcattcatctatatgtgttgtgtatcagaaaccaatgatttaaatctgtcagttatcgagctcagtgttatcttagtttatctgctcttcagccaggagataaaccattaatctttcagttgaattttttctcgttcggtcagtgttgtctcaagttttttttaatgataattctattgcgaagtcctcaaaattcatttccaaatcgtgtacagttgggtactgtgaatttcagacaacgaacagtagctcaaacactttgattcacagctgcaggttcagtattttgtttcgacgcgctaggcatctccaacattttccaggttggcaagattatcaggagggaggagatgactgaagatctaggctgtgcaagaacaaagcctgcctattagcaccgtgtttattcaatggccggcgcctactgcgactggggaggacagtcagcggggcagcgacggctgctgagaaaggagaagcaacagggcgacgacgcttgttgctgctgctgcgagtggtcagtgccagtcgacggcggtggcagaacccacaacccaccgacgattatatatcaccggtagctttgccttgttcttcgagtgagccgggcgtcaccgctgctggcgctccaccacatcgccaggcacacgggaaaaactacgaggaattgccatttcagtcgacaacggcggcggaatcggtggaggcggcgatggcgcctgagggctgaggcgaccgaggcggcggaggcgtaggaagagcaatttgcagcggctgccagatatttgcgagtgaaaaattatgattatactccttcacacattattttttcaggataaaaatacccctccacatttctattaccattaaatatggtgatagtagaaatagatttcaacccttcgattaaatgcgatcaatggttcggattactttctactactggagtcgggctcttcttgcaaatcttctttgcctcagccaccaccccgtgttgccacacactataggtgcccaaaggctcgaggcttgacggcccagcccaacccaggcacggcatggcatggcccacccgttgagccgtgcatgggcctctgtgtcgacacggtgggctggcccggcacgacatggtccaaagatcagggaagcacaatagatgagggaggccaaatagacttattttcagtcatatgaaggcgcggggataagttcaccttgactctcttaactagtggccggatctgattcatatctctgaaccagagtaccggatatcttgacccccaactattaaaatcggtgtgatttgactccctcggtagtttcactggcctgacgcctacgtggtggtttcgacttggttttcattccacgtggtgttaatgtgccgcttatgtgccatgagaattaaaaatatatatatgggacccatttgtcattcacacacaaaaatattgtgggtctaactgacatgcaggtggggcctacatgtcagtcctctctccttcccttcttcctcctccctctctctcccttctctctttctctcccccttcaccatctacggggagagtgtaacatactcaaatatttcaattttgtagaaaatttttcacaagttttccatttggttcttattgaattttactaaattggagcattttatatttttatccttttcaaattgatatctccaaataaaaatgttgagtttttatttcaaaatatttcaaatcttcttagtaacctagaaaccttatattaaacctccttgtcaagttcaaaaagtataaacatcttcctatagatttcatctcctttgaatcctattcaaaataacctcgtaaaatccctaaaatttattcatctgggccaaactttcctctattcagcccatcctcctcctctcccttccactccctcttcctcaggccgccagcctagctggcacatggcccagctgagccgaagccatgccgagctggcccaaccgcgccgcttcctcccttctttcccatgggcgccgccaccaccttgcccaattcggcgcgccgccgccctgctgcgccgccccaaccacccgttgctgccacgccaccaccgcgctgccattgccgcaaccgggggtgcatcgtggcaaccccgaggccaaagccgccactgccattccatggccgccaccgccattccatggctgccgccgctatgctgccaccatcgctgttctccaccgtcacccacggttctcaccaccgccgcatgacgctgcgccacctcctcggctgcgtgttgccgcaagccgccgccgacttaaaattatcttaaaatgcttggaaacttgagtatcatcattctaagcataagatgttgaaataaagagaaaataaaatacaataataaattctcgttatcttcatcaagattttatgtttaaaactacttatacttcaggaataggaatcaccaatatgacacaactctagaaccgggagtatgacacatttcattcgaatgatttaatttcacctctgcagagactgtccagctttacccatacgatgcccacagctagctaggctgagaacaacagagccattcgagagtctcacttactactagttactgcatcggctcgtcatagcccgagctcggaggtattagaggtatctcctcgtcgccctcaggctccggagctccatcgatctcctctctctctctcctattcgctaggcggcgtctccacctcctccctgtctctctcgctgcccccaaatccgacggtgaatctagggccccgcgctgatgaccgccgccgcccgccgatcgtgatcaggagggaggatactgggcgtcgcgaggaggcaactcagatccaggcccgtgagtgccgccgccgcggacaacctcctcggttttttcctcgctcgcttgcctgcacgcacccctcggttttcccagtttttggtgcggttggatttcgatctgtgattggggggtcactgacaggtaatggatggtgtgtatgtgtgtgttgggggggagggggtgcagatgctggggcaggtactgcagaggctccgcccggcgacggcagcagtgcggaggcggcgaggtgcggcagagtgggaggaggcaaagcgagacgaagggctgggaagggtaggtgaggaattattttcttccgctcccccgtgccctatttgcgcgttatggggtttatctccttcaacagtacctaaatgggggtttatctccttcaacagtacctctatccatttaggtcactcaaaataggttccttgcaccgtgggattgagtgtctttgtgccaattttttaggctaagacccttataccggtgcttgcactgtgactgcccttaatcatcaaatctcgaattgtgacctagatgattacaaaagttggctactgaattgctttaatttagtaacaattagatagcatggatttaagtaaagatgttgacttcccaaattggaaatatttctctaagcaagagggagggggaagggaggtgtttggattgggttgaggggttatatttgaagcaaccaacggtgtctgcagtacctcagtgctcagtgccaatttgatggattaacattgtgttttacatggtcaggatcctaagtctactcaagggtactttcaagatgccaaatagcctgcatcttcagttgaattagatatatattttgccgatttgactcttggaatcagtaattaagttaatctcttgctagttgattaagctagctagatttcctgtgggcgcatcaccaatactagttacagttgctaactgtgtccgtgaacatagatttactgcagcgtagtactctctaccatctagatttatactattataatatgtactattataatagtaggttttatattttagtaattagtagaagcagtgagtagcatagtaccagttgcaggattgcagcggcgtaataaggtccatgattgttttctttccgctcctttctatccttctattttccgaagtcgtcactttctccctctgtaaatctgtaatcctaaccgtatgtaaaccctatccttcttaatatatacgacagagctcctgctgtctctctctttttttaaaaaaatgcagcagcgtctaattaatcttcgatctgttcctttcagccaagcgatgtaaccaaccactaggatgtgttctttttttagtaaatttcataaaactatatatactttgactaaactatcacaaaagtgttatatcataaaaactgcagacttaattagcaacaaaataaccatatagaactatagaattaaaatagagtttcacaaaactataaatttagcaacaaatttatcatacaactacagattttagatagagtttcacaaaactacagataaaataacaaaacttatcacaaaactacatgtttagtgctaatttaatcataaaactataatatttgtagctacaatataacggtagtactatggattgaagctatacaacttgtaggttttttttttttgataaaattagccttaattctatagttttgtagtataacattttaaatccataatttagttttgtgaagtttacttttttggatgagtggtcgatcggtgtttttttttttgggggacctccaggtgttggatgtcagtggcacaaatatcatcaagctaccgaagaccatcatcaaactaaagatgctgcaataccttcgtgctggcaaggtaccaaaggatgatctactctcttctttagacttgaaagaatcaagggatctttcaaaaatggtgcacgaagcaattgatggtgttgaattgccggatgtggtagccaaatcagttcaatttggcacgacagcattggacatgacagcagcttattgcacaaagatagtacaaaataccaacaatataaagaagcatgacatattccacaaatattgcaatgtcttgttacctagtattctttggggacttgacatgtatggtgttgaagctcctgatgggattggccaactgaatgacctgcagacactaggtgttgttaatgttgcagttaggaaagccatattgcgtgagcttgaaaaacttacgaaactacacaagttaggattgactggtgtcaacaaggaaaacagccaagctgtcatgtctgtcattgccaacctttcccttcttcactcattatcattgcgagcggagggggatcaaggtttacaaggctgtctagatcacaagttctcacctccaagtaagcttcaaagcctcaagatttatggaaatctagttacactgccaacatggatcactcagctccagaatttggctaagctgaagctacggagcacccaattgaagctagctctttccttggaagtccttgggaagctaccacatttggccattctgcggctatggaagaattcttttaagagcaaagaactcattttcctttttcagcaggggactttccccagtcttctattgctggagattaaagatatagatggcctcaaatcattaagcttcacacaaggagcgatgccaaggcttgagttgttgcatactgataattgtatacacatcgacaacaatgggttttctggtgtgtcatctctcccaagcctaaaagaagttatgctcaagggtgactacaacgacaaattattgaagaacctacgtaatcagcttgctctaaatcaaaaccaaccagttctaaagggggcatgaccgcaagaacttaatgtagtttattattttttgtgtttccatttcatgtatcttataattgttgctcgtttcccttccttctatttgtttctttaaagtttaataagtttaggttacgcgtgttgctgctaatgtgtacttctgcacacacataagcttgttagttggctgtcatttttgttttcatgttccttagtttaagtttcatgagtcatggagtttctttgttttatatgtagcaagaaaacccgaaacgctgcgcttgttgaggcagcaccaaattctctgagttcttagtattactttggcatcgagctcttctctgtttattaggtcgaaggtgtttgaccgggatttgggctgaactccaacaggtgcaaggtgcattaattggggctcagcttgggtgacattggctagctatgtcacaacgtgacattggataaatctagaccatccgaaacaaatccaatggagatgccgcttgggcccacctgcaggtgcaaaataatacccaatccatccattcctgcgcgtgacggcgccccagatccatccatcgcgcgcgtgcttcgccagttcgcctcccatcgccgcgagccagctgggagactcaccgccgccgccgtgaccggagaccaccgcgagtggggaggtgaccgggcgagcgccgcacgaggcaacctctggagggggttgttgtatagactagatagtaccccgcgcgttgctgcggggattcatgtgcaatatatagttataataaacttaaaaatatatccatactacaattgtgtaatatctaagaaaatgtatgattaatatagtacaaaaatattatgcgataatctgatttgtgtaatatgtaagaaaatgcatgattaatatagtacagaaatattatgcaataatctgaagcatcaaagtaccattcatgggtgcaaacgattagtgatgctgtggtataatgtaatgcatatatatattagattattaaaggaaatagtttttttagagtgaattatattcttaaaccatgtctgagtggaacaagcagattagattgtaatattttgtagctctaagctagtgccttacaactaattaagctgccatctaaagtactaaccttggtctgtggagttggagcaatgcaagaagtctacagctgaaataccgtgttaagatgacgcaaaatgtaggtgcctgcaacatgtataacataggcaatagttcaacaaaagaaagtacaattccatgaaatgttttaaaagggtcagttttacctcatactaaaataccacatattttactgacagatagatagcggaagttatttctaacatagaatatacaattttagtgaactaattaaggagaaaatgtgatatctggcagatgattccggaaagaaaggagaaagcaatatgcagcacaaatagaaattaatgaccacaatatcaataaactaactggatggaggttagaaaaatctgagaaccaaaagttgtcgagaaaaaggtttttgaacaccaggataatcaaattactatatgcattgttgccaatggcgatcgatggcatttatgttttgtggttgatcgcatcagctgatgcaattacatccttgcactacattaaaacctccggcaaaacaaaatccgaagaataaggttacactaatcgtaaaattgtagcttacaaacctgaatgtaaagtagaaacaccatatagcaaggaagggtagcatgtgcacatccaagaatcaatatatgtacctaaattaagttaattgctgaaacaatcatagcatgtccttcctgtctacacatgaaaattctgacagtgtttttatggaacaaattgcttagtacctcttacaaagatggtatcgtaggatggtcatataataataatatctggaaagccggtgaccatgaacgaatacgaggtaccaaatatatattaggattttttcttgatagagaactcatatagagaaaccaaatcagttgctgctttggatgggaatgttctggggactgacctcattagccaatagtaataggaactaactgcaataggaattaatagtaatgatgaactgcaatatgaatacataaacacaacaaattataggtgtagaaaaattgtaaaattggtttatatacaatgaactaatagtaatgaactgcaatatgaatacataaacacaacaaattataggtgtagaaaaattgtaaaattggtttatatacaatgaacagggctagtagaaaccgaataaataccatgaattgactcaaagtgtacagaccaaataaatttcaatcttgctagtagaaatgcgaaaccaaatccatctctgttttttaatcatttgataatttcactgacaatatgaagaaatcagtctagcgtgactggaaaaaaaatgcgaataagttgcatgaacatatataagatttaagaagaggatgaaacatacctttgggagagcaatatactcgaaggtgagtgagcgggtgaagctttaatgggagggagaggcccccgtttccagcgaggtggataaagtaggagacaaatcgaagtaacgtgagcagactattaatgccgaggaagatggtttatcatgaaattttgttccatgtgcggtggcgattagtttctgtctctccaaacaccatgaaggcgagcagtctcgaggagccgggaagcatgggaggcgcgcaggaggtggggagccggcgggtcggtcaccattctagcagtgccggcagatgcgaacgcttgggagtcaagagcgataacgacgcagtataatcggaatgggtgcattggtgtcagagctcctgatgaccagccggtagatcaaggtgatggcggcaataacctggaggaagaacagagcgaaggcggaaaggagaaaggcatcaccctcaaggcaaaacgtaatagagttgctaatactaagtatagtgggcccaaatggtttgtgtaattgggcgtgcctgcgtgtggcccatgagtggttggtgagactggagacctgtataactatactgttgcgtgttcaaatgaaaggcatcgatctggaacctggaggcgaaggtggcggtggctccgatcctgttggatcgtgagaaggttctaggattcccaaattatcttgtgtgttcttgagttcgtgattgctgtgagtgagggttctaacaaatctggtatcagagctcgtttcgatccacaaactcttgattcggctgtagaatcaccgatcgagaattggattccactctcgggtggaaaccacgaaaaggcaacttgcctcgattgggttagctgaattcggagcggattgagggttttgatcctggagaagccacgctacgtgaccaagcaagcggcgcaaatcatggcgcaagaaggtaaactggatctgttgctcaaaacattggaggaaaatgagaagaagagggcggaagcagaggaccggaattgagcggatctgaaagagctcagggcggcgatggaggctaggttgcctcatgtggagaagcaggtagtagagctgcacgtgactatgggggatttgagcgtgaaggtgaagaagttgaagaatgctctgctgcggcaagcaaaggtggagaagatgactggggaagttaaggaagatcccttcatagcgtctccttctccctctccgtccctgatccatggtaagcaagaccccatgctgaactcaacttttccttttgctattgagaattctgtggcgcatgaggaaagtttgggtggatctggagtaatacctggtagtgtacctgcgatgacttgccctcaattcaatggagagaatccacagatgtggcgtgctaattgtgaagtgtattttgatgtttatggaattccctcggggcaatgggtgaaaatagcaactctgaattttgttggaaatgctgcttactggttacaatctgtcagaaatcagctgataggggtgacatggttggacctgtgtgatagggtgtgtgctaggtttactagagacaggcaggaggcattggtgaggcaatggttccatgtcaggcagactaacacagtagctgaatatgttgaacgattcgatgggctcatgcaccagttactggcttatgaacattcagtgcttcaagtgtactttgtgcagaaatttattgatgggttaaaagaaaaagtgagaagggtggtaatggtatagcgcccgcaagatatggatgcagccagctcggttgctttgttgcaagaagaagctatgaaaggagttaagatggggacttataaaaggagtgacagtactagctatgtcaaacccatgcacaaggtagtgtcacaaggaaacctgtctgtccaagctaacagggacttatggagttcaccgggagaagataaaaaggggcaagaaactagcagacccaaggaagataaactatctgcattaaaggcttatagaaggtctaagggactatgttttgtttgtggggaaagatgggaaaaggaccacaagtgtgctacatcaattcaacttcatgtggttcaggaattgatagaagttttgcagggtgaagtagaagaaatggcaatttctgagaataccactgaaggtgaagaacccatagtaatggctttatcacagcaagctgctagtggaactgaatcaggcaattcaatcaagctcaggggatagattcagggcactgagttgctaatgcttgtagactcaggtaacactaattcatttattgatgatcaggttggaatgagattatctggagtgaagtgtctgaaacaaccactgaaggtgcagatagctgatgggggccagctagcttgttccaaaatgattccaggttgtaactggtggatgcaaggccacagtttcaaatctgatttcaaattgattccatggggcagttatgacataattttggggatggattggttggagaagcatagtcctatgcaggtggattggatcaacaaatagttggagttccagtatcaaactcaacttattatactccagggtcttcagcaacctagcagcagctgctctcaaatctctgtagaacaattgctgggaatggctaaggctggctccattctgtatatggtcaaattagctgatgtagctgctgcagaggaccagcctattccagaagtcattcaacaagtgattcacaaataccaggaaatatttgaagaacccaaggggttacctcccaggaggaattgtgatcacaaaattcctttgatggaaggagcacaaccagtgaacataaggccatacaggtacaaccctgagttaaaaactgaaattgagaaacaggtgcaagagatgttggtttctggagttattcaaccaagtcagagtgcttggtcctctcctgccttattggttaggaagaaagatgggtcttggagactgtgtgttgactataggcacctcaatgcacttaccattaaaagcaagtatcatgtccccattatagaagagttgctagatgagctatatggttcaaaatggtttactaagcttgaccttcgagctggctaccatcaagtcagaatgagtcctggagaagaacctaaaactgcatttcaaacccattatggccattttgagtacaaggttatgtcgtttggttttactggggcacctgctacctttcaagcagctatgaacaaaaccttggcatcagtcttaagaagatgtgctctagtattctttgatgatatattgatttatagtccagatcttaaaacacatgtggctcatgtttcacaagtattgcagctattgaagcaggatcagtggcaggtgaagttatctaagtgttcttttgcacaacagcaagtttcttacttgggccatgtgattggggtacaaggagtagctactgatcctggcaaaatcaatgatgtggttaattgggcagttccaactaccattaaaaagttaagaggattcctcggtcttgctggatactacagaaagtttgtcagaaactttggagtgttgtgtaaacccttgactcagctgctaaggaagggagtatcttataagtggactgaggaaacacaagaagcttttctggccattaagcaagcattggtgtctgcccctgttcttgctttacctgacttttctaagacattcacagtagaaacagatgctagtgattatggcattggagttgtgccgtcacaggagggacacccagttgcctatcttagcaaagcattgggtccacggtccaggggtctttctacttatgagaaagagtgtatggttgtcttattggctgtagagcgttggaggccttacttgcaacatcaggaattcgttatactcacagatcaccacagtttagtctatctgtcagatcaaaggttgcatactccctggcaacagagagcattcaccaagttattggggttgcaatataaaatttgttataggaagggcagtaccaagtctgcagctaatgcattatccagaaaggagaatgatgaggaagtgcaactgctagcaatatctgttggagtgcctgtatggatacaagaagtgattaagggctatgtctccgaccctttttcatctcagttactaactgaattgactgtgaacagagaagcaagaaaccatttctctttgcaagatggtctcttaaggtataagggcagagtgtgggttggtaataattctgatttgcggtctaaactcatggaagaaatgcacagtcagccacttgggggacactctggcttcccagtaacttacaggaggttgaagcatttgtttgcttggcaaggaatgaaacagcaagtcaagcagtatgtttagaactgccaaatctgcatacaggccaaaccagagagagtgaaataccctaggttactacaaccattacatgttcctgaaggtgcatggcaagtgatttctatggatttcattgagggattaccaacatctgagagatacaattgcattatggtggttgtagataagttttctaagtttgctcatttcctaccactgtctcatccttacactgcagccagtgttgctgacatcttcatgaggaatatttataagcttcatggcatgcccaaggtgataatttctaatcgagacagaatcttcactagtcatttttgggactatttgttcactaaggctggaaccaaactgcatatgagctcatcttatcatcctcagtcagatggccagactgagagagtgaatcaatgtttagaaatcttcctgaggtgcttcattcattctgtccctcgcaaatgggctacttggctatatttggcagaattctggtacaatacctcttaccactcggtagttcacaaaacaccctttgaagttacttatggatatcaacccactcactttggcgtcagcatggaggattgctcagttcctgatctggctgagtggatgagagacagaaggtcgatgcatcaactgattcaacaacacctaaatcgggctcaacagcagatgaaggcttatgctgataagaacagatcctttcgtgagtttacagttggagattgggtgtacctcaaaatccagccatatgttcaatcattagtagccaaaagagctaatcacaaacttgcatttcgatattttgggccattccagattctacagaaggtgggcactatagcttataagctagatttgccggaagattgtctctttcatccagtcgtgcatgtgtcacaactgaaagcagccaagggttttactccttcagttcatcatactctgccttctgaattgggcaaattgcaagtaccaatggcattcctggactatcgtctgttcaaaaagggtaactctgttttatcccaagttctaacgcaatggtcaggtggtgcggcggaggatgctacatgggaggatcaggaagacctacgtgccaggtttccgcatgcgccggcttgggggcaagccggttcccaaggaagggagaatgtcagagctcctgatgaccaactggtagatgaaggtgatggcggcaataacctggaggaagaagaacagagtgaaggcggacaggagaaaggcgtcacccttaaggcaaaacgtaatagagttgctaatactaagtatagtgggcccgaatggcttgtgtaattgggcgtgcctgcgtgtggcccatgagtggttggtgagactggagacctgtataactatactgttgcgtgttcaaatgaaaggcatcgatctggaaactggaggcgaaggcggcggtggctccgatcctgttggatcgtgagaaggttctaggattcccaaattatcttgtgtgttcttgagttcgtgattgctgtgagtgagggttctaacaattgggccttggtagtggcttgggcttgcccatgtatattgggcagtggttaacggtagggaggagagggactgcaatctgaacgattgctatttcatctaacgatttagagatgaatttacaaattgtggggaaaaagtgcaccgaaggtccctcaacttgtcatccggataaaaaaaacgtcctcaaaccgcaaaaccagatatgcggggtcccttaactatacaaaattgttcactttaggtccctcggtggttttgaccccggttttgtctgacgtggcggttgcgtcagcatgggacccacgtgggccccacatgtcaggtagaccacgtcaccaccctctctctctctctcccttcctctctccttttttcctctccacgtggatgtcggcagtgtcttcgacgcagtggggaggaaggccggcgtggccggaggctgacggggaaggagcgcggcggagaggagggccgatgcgacgggcagcgccgccaatggctgtcgtcgcgcggggaggagcgcggcagtcgtctgccttccctcctcctcctccgcatgccgtgcggcgcggcgccattgccgtggcctacggggcatcgtcggggtgaggcggcgacgcatggtggcgcgggcggcgtggtggaggggagggcctgcgtagagtggccgatgcacggtggctcaggtggcgcggcagaggaaagggcccacgttggtgtcatcgatgagccggatgggacggtggcggtgtggccaactctcgatcttggtcaggctgatgtcccggaacgcgaaggccggcaacaccttgaacatcaccgacgtcccctccctctcgatcttggtcacgaaccgcgtcacgtcgccggcgtcgtcctggatgccgtcggcgagcacctgaagcccgtagaggtcaatggcgcaggaggatgcgatggtggcggtttcccggagctccgcggcagcgacgtgccacggtgtcatcgaaggctagattccgcagctcttttggcgaaaagtcgtttgcacgccgctctgtagccagccggcaaccgcccagcgctcgtcacaagaaaagtttcctcggatccatgcacacatcaactttcaagcaacacatgcgactttgttgctgaaacgacgatgggctttgtgcaaaatttgacacaagttctagccgctgaacttgatttcacagccgagttgaggaccatggcgttgagggtgagctcgcactgggcgagcacctgagggtgggagttgacgcgggtgaggaggtccctgcggatgcccggaagcgcgaggaggcagtggtggacgggaacaggaggaggtccggcgtggcgacgtcgatgacgagggcgagggcctccgcgcgtacctcctccgcctcccacgccggccgctgccgcgtgccgccatcgccgatggcagtgacttgatggcggcggcgttgagtcgaagatggcgacagccgtgcgccgccatcgccgaccgcacgaaggggatgaggaggctggcgagctcgcgccgccactcgggagccgccgtcgccggccacaccaccctccggccgcgcgggacgccgcccgtgcgagagcagggagcgagagggaggaaggaacgaaagaaaaaaagaaagagaagagggggaaagataatggtgctgacgtggcaccccgacatgtggggtctacatgggcttcacggtgactcagccgccacgtgggacaaaaccggggttaaaaccgccgagggatctagtttgcactggttttgtaagttgaaggatccgttatatccggttttatggttgggggacgatttcgtaactccatgacaagttgaggaactttcggtgtactttttcccaaattgtgggacctgtgaacttattccttccattgtaaacatatgggctggaagtgaggcccacccaaagttctgaaagaaggcccgaagaagcccacaatatttaccacaagtttcttttcagtccagcccacgtggctacggtcgcctggaacttggaggcggcggcggcacccccccccaccccccccccactaccaccggcgaggcggcgacggcggcggcggcggcgagctcccctgcgtattagtcatcggcgccgtcgcaagctcgtctcgcggtccatttgttcgtaagcggcggcggcagtgctcccaggcaggcccctctaaaaccctggacgccaagatgctgcgctgcgtgtacacgcagcggcggtgggcgcaccggcggggaggcttcgtcaccggcgggaccggctggtcgcagcggcgcgcccccgccgcggcggcggctgttggcgcgggcgcgggcgcgaagaagtcggagtggtgggcggtggacggcgagatgcacgagatcggggagggcgtgccgcaccgcgagcgcttcgccatcccgcgcgacaacctccccaaccgccgccggaagcagatgcgggagcagttcatgcgccgcacgcgcctcgtcctcaaggacacggtaagctgccgccgccgcgcgcccgcacctgtagttagctgagctctgctcctcccccaatccccccgcgctaggattggattacccattccttttgttgaaacaatgattggattgagctcggctgcttgtttctgaacaatttggttgagcccaaatggaaacgaactctgcaatttgatttgtgcaggcaagtactgatgtactaccacttattatgcatttattagttttcattgggaagtaggataaatctccttgctaataagctagcagaaatttggaatcatgggataggaaaaattgagaaacatggaatgaaactcaagatgctattgtatcttaatgcagtcagtaacaagcagcagaaatcattgacaaaatggggtctgaattcagtttttttttagaagatctgaattcgaatattaagccatgtcttctctaagcggatgatgcccccttttcctagatccgaagccgctgccattttgtcctattaaaaatcatggaagttctgcagcaactcaactttgtacattaattttttttttccttttcatggttagtaagatttttctgccttgctctttaagactaattatgttttagccaacttcaatctgctattatctgcacactcgcacttatatcttttctacttttagttggtcacacactgaacatgtaatctctcagatctcttctttttggcaatagaaagggggcgtatgagcgtatcgatgtatggtgcaaacagaagaacatgttgatgcacctttgttgttagtgtacgattcaggacaagaaaagggcaaaccaaattcacattatttattcttcatttctgagagccagtgtaactgaggccatcctaacctgatttttgtgagacctaagcatggttagctgttttcttgtggattgcacatactgattcttgaaatacattttaggcatgtcgtacactttatataactatcggtccattatttcgttcattagtcagtgccaaaactttggtcaccaaagcacttttcgctggttttgacttttgaggtgaagagatacaaactatgtgaattgtgaaggctttgatatggaaataagataccatgaaaattctgtgttgccatagcttaggttaggcatttcttggaataaaccagacaggtgcatgtactgtgtgagaattcatgattttggattcgtgaaaaatcattatttcttacagcaagaattttggactttggaaaacaacatcaagttcaggtttttgttgtatttcatatctcatgcctacctgtcatcaaggtttttatcaaaagcattcatgtcagttaccttttttagtcgaacattctgtctcttcgtttgtttatttgagttgcccatgatgtgcaattcatgaggacaaattgcattaaattcttttgttcgaactttgaaatgttccttgtggccaactgtagttaggagcacaattaactatttaatacagtaaatggactgtgcataatgaactgaactgaatggaaaatttgccgatcctctatttataaagtgctatgtttaatatcatgagagaacatattattttattattcatgaactagtgtgcaaaggctccatgtgctttatcggcttacagatatcagcatggcctttcatattaggtgactgaataccacaaaatttacaggaacatgaagcttggtgtaaaaaatatatggaactataccaagaacttagagagaattgggaaaggttatattgggatgaaggttattccaaaaagattgctgaagatcatgctaattatgattctgctgaagaagatgatctagacttctcaccttacaggtagaaaattttgaagggatttatttttgtcttgtttatttgctagtcaaattgctcagtttttgtcagaataaacctgagttaattgtatgtgcaattctttgataaatgtttgatataattgaaactgcttcctcttattttattgtttgtagtatctctccttttcattatgtgttattgcaactaagattgaattgaattgttttcctcatatatatatatttatcttagatttccagcctataaatgtttagcaatattctttaactagttatccttctgaagggtcttgctcgaaatagagtgccaataatatttgtcatctgtggaatgatctcatctgttgttttcaattgcagcaggagaaggcacaccaatgtagagccaaacaaggtaacctcattgtatttttgatggaccttatataatatcatttatttatgtagaaacctgcctgtaatgttccaatcttgctatgctaagggtgtcggctatcctttcatatggaaacacaaaatttctacctaagctagctagactgaaggggaattcttactaatccatgcataacctatgggtgttcaaactggttttgccaacccatttgtaactgcgccatgcacacatagactgcacccctgaaagtaatataaacaaatgaatgttcatttctgcatgtccattcaggttgccaagcccagttgacctggtatgaacaaccctagtgtcaaacttcagtggacatttttttttctactataatgcatgacattaactgtagtcaaaagtctacgacctcccattattttctgggaaaactactgaatactgaccatgggcaatcagattcagcacttggcagtattggagatatgcccttaagagttagagctcattagcggtactttagtggtgtagtttgtctttgcagctgctttagtcaaaggttttggtggcattgtctaagtagtatttaagcacacatcttcatgagtgtgatgacactacgcaaacttagcagcacaatcctaagttagcattgactttatttcaggacattggttttacggcaagcaaacaaggtgaaacatgggaaagggttactcaaattcgtgacaagtttgaatatgacagagagagaagaatgagggaacgaggtaaacatcatgtcttcatagttcatactggaatttttcttttttgtctgccattgctatttgtaccctcagataatgtataggtaaatggtaaaaaatgttaggcattttcactaacccaggatataattctgtaccaagttgctgatccttggctcgccgggcactccattcctaaaaaaatgcatttccacaacctcctgtccataaaattattgatactactgtttttatagtaaacatgtcatgttaaatgtgttgcccagtaactgtttttacactgttagacattttgcacatgaagttctgttggtattactttctttcagcctctatatgccatgtttaattatgttctttttgtctttctttctctatgatgcagcatttgctcccatgaatatggagaacaactttgggcagcatgactcgagattcaggaaccgacatgattcaaactatgcccctagaaacatggaaaataaatttggttcaaatgactcagattttggaacccaatctggtagaagtttccgacatgatccaagtttcaggaaccagcacggtttgaatttccaaaatgaatcaagtttcagaaatcaccagtatccaaatttccaaaaccaacgagacccaagaaaccgcgtgatgtcttctgaagatcaggaattgatgtcttctgatgatcaggaattctaataagcatgatcttgccgagtgcgaggtggccagtgaaaattgtacaactgaagcgtgctgattttgtaactctgttaagcataaacagaatgaaatgcattttacattggcaactgtagtataatgtcaatgtgtcccttcatcgttgagacttgagagaagggttgagtgttgtaggaatcatcacctgccttttacccgtctcttcatttgtgatgattcagaatactatatctagtatctacaacaaatagttatacactgactgtggcaaagtacaacgacaacctcaaaaaatgctcagatccagcgtgaattttgtaagtgatagaaaataatgccaatcctagagtagcgaatagaaaatgagggccatctttggagtgttgctggagcttgtcgccttcaaaagctccttagtgggacggctaacctaggcaactaagctccccgagttgtctagtgtgtgtgggtcttggtaggagggctcgggcactcctactttgttttttctttgtgttgtgttttttgtattgttttttcttccccttaatgaaatgaaatgcagctctcctgcctttttgaggaaaaaaaagcgtgaattttgttggtattttcttttatgcaggatcaccatttcgatagggctcaccctatctaaaattttccttgaagttcatatattaccaaaccctaaaaaagggcaggaaattacatttaaattgtcgtccatagctatagcttggagtcgtgagttagtttctacttcctctgttttatattataagactttctagcattacccatattcatatatatgttaatgaatctagacatatataaatctagattcattaatatttgtatgaatatgggtaatgttaaaaagttatataacctgaaacggagggagtactatctaacaagcatactcgatgccaattttctaagcttttatgtttttacaaaaattctccaaaataagattgtcaacaatttctgacattgtttttttctaaaaaaaaaaacacacccactacaaacgctgacaatatgcacacactcacccggtcaccttatgagcacatctcaaaaacacgagcactcatactaaatctatctatgactttaatcgggatgagtacgtctcaccaaaaagagcttagctattcgaactatgctgcttggccctttgtttttttttttagtgatagagagcgaaataggctcttttatcgttggcaatcgctgactttttttcagttttagatttttttaaaaaaatatttacagaaataatctatcggccaaaaaaattacaaaaatagaccctgccgcccacctctggggcggcaagctgacgtggcaaacgggggaggaacgggcggtgacggagggagggttttttgcaggaaaacccttgccgccctctggtggggcggcaaggggcccgaatgcaaaaaagccggtcggggccggctattttgcaggcggccccttgccgccctctggccgggcggcaggcctcgctgcctataaaaggcctgctgcccagcccccagccctcattcttctctcctcaattccagtgaaaaaaaaaagaagagaggggaggagaagagaagaaggggcgaagccctgccggattcagacgccgatttcaggtaatattcatagatcctatatgtgactattgagttaaatagtgtgtattctttaaaaatttgtttgaataaatgcattatatttttagggttttagttgtactaatctagaagtgcgtattgtagatatcggtaactacgtagatctgctagtttggaatcaatacattaccattgcattggcttacacaagaagatattacgttgtagatgtttattgcatgaaagagtaatatgatctagttatttcgttgacagatatgtcgaacaaacaaatattccaagtttaccatggaccaggaaacgtccgttacgggccaactggggtagatctgtcaaattttattgtatcagaaaggggaattgatagaccggctgagaggagtgtaccttctataaaaggatggttaatgaggggcttgagagttgatccacagacaagtgacataacaatcaatgttatagtaagtcgggcaactgagggtttttattgggaactaatgccagttcaaaactctcgagtgtggagatggtatttggaaaatgcattgcaacgcgggtggcctctagctttggttccgtttgttcacccgaaggatccaggtgtgcagatgaacatggatgatggcgagggaccaagtgctgaagtaaacgagacttctgtggaggaggtcaacgcacgagacgacgggggcatagtagctccagtgggcattcaaccaggtggagtggccgacgagggggagactgtcggtgccattgtggatgaaatggagaaggaggattccgataacgagcgtgtagaggaaggtgattcgtcagatgatgagactgatattaatccagcagaatgggctagtgaggatttttctgggctgatcgtctctgaagaggatagtgtgagatgggagtacaaagaaaatgaggttattcagggagcgatttatagtagagcagaagatatgaaggaggcggtaaaacattttgcagtgtcacttcatagagagttttgggttgccaagtcgaaccggtcgcaatatgaagttcggtgtgttaaggaaaaagatggttgtccctagagagtgcacgcgtataaggggaaatggaaggattattggacagtgtcagtcgttaccaagcatacatgttttctacctggtgttcagaaataccacaggaacattacttgtgcatttgttgcatctgagatgtatgcgcatgtcatcgataatctcacatatgaaccaaggtcaataatccgacacatcgaagagacatacaagtatactattagctatgccaaggcctggagggccaaacagaaaataatagagatgagatttggaacttacgaagcctcgtatgacaatttgccacgcctgcttggtgttatcgaggaaagaaaccctgggagctcttacgaagtgaagaaattcccctcaattgaacatcctagcaagagtgtgctgcaaagggcgttcttagctctacatgcatgcaagatggcattcgtgaactgtcgtcctgttctctgcattgatgggacattcttgacaggaaagtatcggggccagatactaacagcaataagggtagatgggaacaatcaggtattgcccttggcatttgcttttgttgagagtgagaataccgacagctggtactggttcctgaaattggttaaaacaaaagttattggtatgaggccaaatgtgtgcctgatacatgataggcacgctggcattctgcgagcgatagaagagttgcagtttggaagtatggaacgaggataccccggtgtttgggaagatgtacagagtaggtggtgcatgcgtcatatgggagctaatttcttcaagcaattcaagaacaaggagctcatgaacatgttcaagaggctgtgcaatcagaaccaggagaaaaaattcaatgagctttggaagagattagatgagttgacagccaaatgcagtgatcagcgtgcagcggctccatcgaccgccgttgctgaccctcctcaagctcttggacctctcccaacggatagtccaatattggttagaagaactggattggagattcggaaattttctcagtggattctgcatgaaccaaaagagaaatgggccaaggcgtatgacacaggtggtgctagatatggaataatgacaacaaatttggcagaagtttacaactgggtgatgcgcggtgtccgtggactgccactagttggcatagtggagttcattttacatgggacatgcaggtattttagggatcggttccaggcagttcttccctctatgccgaacaacagcattttgtttggagctttcatacagaaaaagctagaggagttgcgtaaaaaggccatgaaacatcgagctctagtgcaaggtacccaacagcacaggtttgagatactatgtcaagataaggcaggcaggggtatctaccgcaagagagtgaagcaggagtgtgttctcaaagccgacggcacatgtcattgctcttgtgcaaagccgaagctgctccacaggccatgcacccatgtcattgctgccgcagcggagtgtggcataccagatgcagtatatgtgtcacagtacttcagtaagcaagcaatatatcatacatggagcggccagatttatgggttcggcatagctggggagttcacagagactaacgatgaagtactcaatattcctgacccatcgaagctccgaggcaaggctggaaggaggaggactcgtcgcatccgcaacgatatggacgagtcggaggctggcatggtgaagcgttgcagcaaatgtgatgaacatgggcacacctacaagcattgtcctaaagacaaggagaaaccaagtgcggcggaggcaggactatcaggatcagcagcagatggagctcgccctatgggtgaaggcactacctccactcgaccacgtcctaggcgtcgtcgtgccacgtctggctacgtggtgtagttcttatgttctatgtcggcatgtggatttgcttgtaattcgtttcgaacttatcgatgtgtttatgtttcgtcgtgtaatgtcagacttcggcatgtcatgtctttaggtctcgtgatgtaacgtcggactaaggcgcctaacgtctttaggtatgctgatgtatgtcggacttcgacacgtaatgttatgttatattattgaactctacatatatgttaaattgcacgtcatcgttatgtaccattagtaacgtttgctatatttaaatagcttgtactcttgttgtacataattaatctcatgattttattactattttataattttgaaagttatcttttgttttacattactattttttgaattgttctaacacgaaacactatattttccagagatggcacgtcaggatacacctcagttgttggacccggcgatagatcaccgacaccggtctcaccttactgcggtgcagggggctcagcttgggacgttccgggcacggacgtgcggtgagctactcacggttcacgactcctttgtcgagaggtacgaacagtgttttactataagttagttgcactgtaatattttttataatgacatattaatttgttattgcaggctacgtgaggccggcctcctaccgatgtgtcggctggtggaggctgcggccggcgatgcggacccggccagacgatggactgtggacaggtccctcctagcagctttggtcgatcgatggaggccagagacgcacacttttcacttgccgtgcggtgaggtagcccctaccctacaggacgtatcgtacttgttggggctaccgctcgcgggagacgctgttgggccagtgaccacggctgtggactggcaggacgatctgacggcacgtttcgcactagtacagcgcgcaccgcacctcccgctcgagccgttggcacaccaccgcaacaccggacctacgaagaggtggctgcttcagttcaccgtgagtgtttttgtaccgaaatgacaatcgtattacatatttagtccgcagttaaggtgcctaacattttatcgacggcttgcaggttgagcagctacaggcggaggccgacgagtactcctacagccgatgtttggaggcgtacttgctctggctttttggctgggtgatgttctgtggcggtcacgggcacgcggtcgacaagggactcgtgcactacgccaggagcatcgccgacgccgcggtaggcgaggtgcctcagtggagctggggttccgcgttgttggcggctctgtaccgtgcactttgtgagtcttgcacgaagacggatcccagtgcgacctttggtgggtgtcctctctttctttctatctgggcagctgagaggattgcgatcggccgccctgaggtggaccagcacgcgtacgaggagtcactgtacgaggagcgaccagaggtcgactaccctacgatgagtactctgtggtgccgtcgtcaggtacgttgcatcgatcttatcgtattgttaagttaattgctaagttcattgtacatcacatcgatcgtctcgtattgcagcgccgatgggctcacgtccaggttaggcggtcgtatcctgagtttgttatggagttcgaccgccttctgccgactgacgtcgtgtgggagccctacagtgccgcggctacccaggctcgtgcgccgttgggtctgtccacactctgcaccagggaccaggcgtactggatgactacggttccgatggtgttcgacatctgcgttgagcctcacgcccctttccgcgtaatgcggcagttcggcttccgtcagccctttccagtaccgtttccgaccaccgtcccagctgctgttcaccggtaagatcttgcactacgctttccgttgttgcattaaaatctgcctgttcacaataatttgtaacatctgtcgtttcacactaatattacacattaattcgcaggtactcgcgcaagggtcagcagtcagctggcgactggcccgccaagttggcgacttttgttgaggactggttgctcgcaaccgaggaggtcgtggaccacgagggagagccacacactgaggagtcgtaccaggcctacctacgctggtaccagccacgcacccgtactagggtcaccttcgctcccttggagcagcagccccacgttgcgagcactagagacctctatgccaggcaccacgaccaggacttccctcgtgctgtgagtaccctgcatcgcatcattcctttatgttttcatgtctttctcttcgtcaaattttacgaatatttacgaacaaattaaccatgcaggtcgacgacatcaaccgggtcgtcgttgacggttcaacgacgatccaacgtttaggcgcggggattccggtacccgtagaggagcacctgacgacgtacacgcggatggtggagtcgatgcgctcgattctccgagtgctcacctgtcatgcagacgacgttgctcgggcagacgcagctgtacagcggccacccgtaccgactggtccccatccagctgcgcacgttcctaggccgactctccctccgcacggaggtaagtatttttattactatttctgtacatgcctcgcacacatataagtgagccgtttcacttgccgattgcttcagggtttcgtgcaccgttcagcaccccgccttcctcggctaggccttctgttgtgccccccacaggtacttaaaaaaacaacattacttcgacaatcaatttacatacattttatgtcttagcttacaagggtcccgttgtcgatgtgtaggtttcgcccagttcgctatgacgcaggccgcccacttctcccaggctgcagggtcagcgtctcaggcagctgtgtcgacctcgcactcagcgcagttctggcagtacaccgggacttcgtcacaggcagccggcacgtcgagtcagggtccaccactggaccatgctgggacctcgtcggaccgcttgctgccttccaccttgctcttcgacatcactgacttcgacttcgcttcaggctcgacagaggatgtcatcggcccctcacagctgagaggcgcaccgccggtgcagacgtaggaccaggcgcaggccactcctccgcgggacactcgtgctacccgtgctatgccaccggatcgtttcacctactcccaggaccacgtgcgagcacaggcccagaggaccaagcgtggtcgcggcgcggggcagggccagtagagcagtcttctctttgtttacttgcttcactttccagtactgtatgcttgtgtaatgactacgttgttgttatatgtgcacgatacctttcggcgcatgcacgactactttctgccgcaccgatgcagcctcctttattcgcgtgtgatacgagtatttgcccgccatttggcgcatacgaccaatgtaactttcggcgccgatcatgcatgtatctttcggcgccaatcaggcgtacccaccataccccaccacgttcacatgtcaagggtatcactcgattttttgcgcctatataagtcgccttaacgagtgagtctcacaatctttcagaactcagtcacattcagtactctcttccccacttgcttcattacaaatccgaccggctttcgtcaatggctagacgccggggtgttgaggatccaaactggcgtagcgatccttgtgtatacctactaccaccttggtgccagcgtcctctctgcctatgcggtgatcgatgccaactaatggcttcgaggaatcctgatattcgaggaaggcgcttttttaggttccctaactatgaccgtgaggtattttattatctgcatatgcttattcattccgtatgggcaatcgctttattcttcgtaacactactctattcgacagacccgcactacggcttgcgcatacatcgagtgggtcgatacagaaaatcccgttctcgacctaaccacttgtttacaagaaggtcgctggtatttcgcatccgaaagtactgagcaatacttacagagaaaagcggcttatgaacgacaatgtcgtgaacaacagagcgactggcgggtgctaactacggcactccctccatgggaagcccgtccaagatgcaggtgtggtgatcgttgtcaggttcttcgttccataaatcctacaacattgggttgaaggttctttgtttgtccaaatattcttgacgacgatttcatggtaagaatattttgattacatgaatccttattttctcacaacatttactaactttgcttgctttacatctattctttcctcccaggaaccaccaaggagatgtcaatacagagaatggatagacaccagaagggttctaactccacctagccgtgttgtgcagcttgaactaccagagcaatacaaggttactaaagcgcggtttgagagaggagagggatcctcacgtaggggttagctattatcggacaacttggcatattgaaatttttactgtcatgtttccttgtcccattactacatcgtcgttgtgttcaactattgcactacctccctcctagttcgaatctaatatcatctatgtaaccgcaatgcaaataattgtatcatgttcaaattgtactactatttcttcatgttacataattctccttgtttaagtccatataatgtttctacgacccagactgcgataggcctatataaattatccgagtactaatacgtcgaataaggtacaaaataatacctcacttaacatatgaaattgcgcaacaaccaacttcaatacatttttataacaatattaacaagttttaccaataaatacttctttataacaatattaacaagttttgccccaataaggacggcaagggacccagatgaaaaaagtacggccgcaagttctttatgggcggccaaaattgcaattagcctatgggcggcaagggcctaatcgcaattttggccgacggcggcagacggcgcggtcgacccaccgtctgccacgtcagcttgccgcccaccattagggcggcaggggctatttctgcaatttttttggtcgatagattatttctgtaaatattaaaaaaaatctaaaaacgaaaaaacttcggcaatcgctttctgtattctgtaaaagaagcccaacgaagctacggagcccggcccaccaagaagcaacccccctggtaagccccagatgaagcgacaacccgatcggacggtccagattcacgcgatgccaatataagacagtcaccacgcccacgcgcaaaaccctcgagacctagggcttcctccttcccctccgagcaccgccgccgccgccgccaccgccaccgcagcctgaccgctcggtctccggcaaccaggtgcgagtcccccccccccccttcctgaccccagctcaagcgaggcatttctcgtgttcgtcagttctatccatgtggttgcgctcgagtgtgttgttcctttcgtctgatctgaaggccccccgtacctgattttgtttgtgagctacgtgctgttcttgagtctgctgggttatactgtaatcattccgaccatccgggttagctaagagtttttggttgctagatgttgagagtggcatcgctggtggttgggtggatctccagtaaccatgtatttttgttagtatagtatttatctgcgatttagttgttggtcttggtggacaatttcgagtcctttcgatttgggaatgactcgcaactaggatgttggtgcttttgtacggtcgatttgcaatgtagcgactagcgagctatccatttcaacagattatttttactacctgggggtttcgtggggcagaaatgtgtagtgtcttcatgaacacttaatctgctgactaactattgacacagtgggagaagttttggtttaaaggaaatctggttttcatgttgctttgttggcatttcaaggtagcagcttcgtatgggattttatttaggaatgtgttctttctgttagattcagaatgctaaatgtagcagttaaaagtgtgacactgattttgttggttttcttaatgaagcagctgacggttgcaatttcatttgctagaaactacgatgtaatgcttaggaagtccaacagccaattaattttagaccattgttctaaaatggtatgatgtggtagtctgatggatcctttagttgcatgcattatatacttgttcacatgttacaaatcatgcattcatctgtgatagttgtccatacttatataatgatgtttggcatccttgaggtcattttttctataaaaaaggctatttgctatcttttgaaagtacattcaaatgtttgtagttgaactctgtattagtgatatacatttagtcattaagttgtcttatgctcggtttggacagatgcctacctgtttctttttttttttggtagctattgtttgtgtgtcaattattcagtgtttaccagttggagctatgttacaaatgtgaaatggttttactactgtctttattgaagcttgtagttttttaaggtgtgtttgttgccaacggtacttatcttttgcagacaaaatggtgagagtcagtgtcctcaacgatgctctgaaaacaatgtacaatgctgagaagcgtgggaagcggcaagtgatgatccgaccctcatcaaaggttatcatcaagtttctcatcgtgatgcagaagcacggtaagccttctctctgtgtttatgcatgctcactagtaatacgagctgcaaacctatagttcatttgtcaggagtattgagactggtgccttaactggtcatactgtatatcctcaatgtaggctacattggtgaatttgagtttgttgatgaccaccgctctggcaaaattgttgttgagctgaacggacgcctcaacaagtgtggtgtcatcagccctcgcttcgatgttggtgtcaaggaaatcgaatcatggactgcgaggctgcttccctccagacaggttagtaaagaagctataatttatttgggaacatccattagcttcagttcttttttctgtgaaatgttactaatgtttattgtttgttgctctccagtttgggtacattgtccttactacttcagctggcattatggaccatgaggaggctcgcagaaagaacgttggtgggaaggtcctcggtttcttctactagaaagatatatcttgttgacactctacggggatttcttatacagtagatggattctcccagtaggtgttagtggaagagcattttattagcagttgagtcaaaaaccttgttaagatgatcctcgaatgtctgaattgccccttaatgtcatatgttgtctgtttaattttgcttggcgacttgagtaagctgctgtattcttgctccttggaggccgcatgctttttttgttaactttttataagttattactgaaaattcctggaagatattctatcatttttttggtctagccacttcacttgataaactgcataacgtatagttcagtaaatccactaatccctgttcactggacaggaagctttattgaagttgtaatatactcctacaagcagataatagttctagctagcagcattttgcatgttgctagttactctgatgtctgatcatcgttcgaaaaagaggtgttgctttgatcagctttgccgcttgcatcatatatcatgcaaaatactactgagtcgtgatttgcatcactgctacgtgtgcggttgccaccgcccaccatcaacttctttcctacgcattgatatcgagtcgcacgttaagttacagttagtcataggattgggattcgatgacattgctcaggtgacattcgctgtgacattgaatcactgccgtgtgggacccacgtgggtctaggcacatgtgggtcccacatgtcagtgactcaatgtcaccgagaatgttacgggggaatgtcactgaatctgtgtctgttagtcatatattagttgtaaagttgatcaagccgttagtcatatattagttgtaaagttgatcaagccacacgactcgaaggccactactccaccaagtagctcgtcgcatgattagtcatgcttagtcataaagttggtcatagattagtcgtgattagttgtagaaaaactccaattcatcctgctaattggtttattgtgtttactactatacttacttcggttttatttcttgttgacttattatcttgctggctactccataatctatagtttttataatatatagcgcttactacactataacattagtaaagattatatagtgtatccattgttttcacacaactaagctgtggactactcaccaagtcagctcaggggatgcctcgactcgattttatgacttgacaatgcggcaaggagctcgaacaatgtcatgagcggagtgattggaggaggagcatgaaagggagtagtggcaaccgaatgagactaggaggttttgggcacttggtgtgggggtatgaagaggatgaggtgggagaggcgaatggagctaagctaggggaggaagcgggaaaggtaggttggcagcatgtaggagagatgggagtagagtgtggtcatgaagaggaggtcctcactgacaagtggtgggagggtgaagtacgacaacaaaagcatgagtagtagcggtggcatagcttctagggtcaaactggaggtgaagcctcacgtaggtatatctggaaaggtatataagaaatatgtccttacgaggcatgcattccgaagagtccactatgagataaataaattactatgcatacaagggctccatgtaggaactaatgttgctacaagaaatcactatcgtagcaaaatctgctctagggcttgtctggcaaatggatgtaggaaaatatatccattcattcattcttcttacctcatttaattctaaccatttattcattgagtatctaaagcatattgtggaaaatgaccataccaactgtttcgatcggcgtgtatatggctacgatagtaaaactgttccgttaacattatacgtatacatttatcattcatgaacatcaaaactctattttggtgattaattgaccatttcccgtttaattacctagatagtcattcacatactgtgctcgattatgatctaaagtagtttatttagactttctttgttataaccttttgttttacttattcaatacaaccaaaacctatcactatttgagtatttattgtaaaaatgtgctgtgggaaactatatatttaaaaaagtgaagttatggttgttcaattaagcaacaacatgaatgtatgatttatatatttgtatacactagcatattgcctgtgcgttgcaacgaaattttaattgatgaaaatgatcattaacctttgctattatcattattttattatcatctcttaaattctacatatatttgtaactaaaccctatcacctcacaatataattcttacttcccacaaaaaatagaggtggtggggtggttgacatgtgggaccttatcttttcttcactctaaaagggtaaggactaaggaggtggtggtggggcgcgatcgctaatcggtgcgcgcgccggcggcgcgcgtttcaggcccatagggcccagcaccggcgcgcgcgcctccttcgacgcttttttttcgtttttctttagcgattttttttcgttttcttttccacttttttctgattattttttttaatctttagcatgttttgagtttgaaagtttttaaattttgagttgaaaatttttaaatctgaatttgaaagttttcaaatctcgagttgaaagttttcaaatatggacttgaaagttttcaaatctcgagttggaagttttctaatttttcaaatctggacttgaaagttttcgaatctcgagttgaaagttttcgtatctcgagttgaaagtttttaaaatttgactttaaagtttaaaattaaaatcgaaaattttcaaatctaacttaaaaaattttcaatctgttagtaaaaaaatctccaaaatctttcttaattactatcattagtgttaagtatatattaactaatggagatagttaagtatattaactaatagtgttaatagagtaggttaataagggaggagtgctcgctagctagtagaagcgcgtcgcgtgtcgcatgggccgggccaaccgcggggggagggggtgggggcaacagccgcgcgctagttaatttgctcgcgcgagctaggaccctccgtggtggggtggcagattcaccacctaccaccaccactactccttttcaaagaagtataggtttaaatctccaaaagatacataatattataaaatacctatatatatttgcgttatatttccatataatactgattaatcttatgcatttcgattaatctgtaaacgatactcttttcattctacaaccgtattccctcttgtacggcactgatgtaaagttagatgatccttttttacctttatacagtatgttcagtccaaagtgaaagtgttcagctgcccgaaggcccagcccacgggaaaaaagaacactgcccaaaggcccagataactagacatcccgatcagacggcccagattcaccagatccagctataaaaatccggaccacgcccaccacccaaaaccctccggctcattcttgcccacgccgcgccgccgcctcctcctcctcctcctcctcctcctcctagggcttcttcttcttcccctcctccgagcgccgccgccgccgacgagatggtacgatccgttccttaccttcaccgcctcatgaccctcaccctcaagccgatacgattcgagtgctctctctcccctcgcgccagcgcctctgatctgactaatttttctcttttcgtttggatgtgcgacgcggtgcgcaggtgctatccaacgacatcgacctcctcaaccctcccgcggagctcgagaagctcaagcacaagaagaagcgcctcgtgcagtcccccaactcattcttcatggtatgacgtgaatccccgcacgcgcacgcatctcgtacctgtgtttcctttcgtagctgctgttcctcttttctgtgagagactacagctaagtgttttttttctttgttttcgcttggtcctgacgttgttcttggtttgatctgtctcgtgtgttgcaggatgtcaagtgccagggatgcttcaacatgtaataacttttaacctcagtagtttattttgttctgaataattgcatcactatgctttgattgtccctagtctaccttagagcctttatgatttttgcaatttaggttagcactctttagttaagattgactggcagctagacaacatgaaattttagctgttgctggataccttgttcttggtgcaagccaattatgctattgtctgatttaccacccatgtgcggctctgtgcggtttcctgtagtttctttttttatgaatatatatgctaatgctatgatatgttggtagtgaatattaactagtactcctgctgtctgagtagttgtctaagtgttgctacatcctgctgcaatgtaaatccctctactttcaagtattcatagttggcaaatattgatgaataaaaggcctgcttgatgcatgtcaatcattttagaattagcatttgagaaaagttgaaacagcgttcttcgtcagatttgccgtgatatgttaacaatcatgtatacccctttgtgactttgtcgtccaaggaatcacaatattggcctgaaagttgaaactgggacaacaaatttgtactctagtaattggcactgtgattgctagttacatgtacggtcttgatttagaaagttagatatctgtatactgttttatagcttgccgttctcacattcgaaatgcaatgttcatattgcagaacaaccgtgttcagccactcccagactgttgttgtgtgcccaggctgccaaacggtgctctgccagcccacaggagggaaggccaggctcaccgagggctgctccttccgccggaagggcgactagagtgtgagtcgttcattcagaagacgatgtttttgtgccaagcaagtgttccacctccaaggatgtagtcttcgagttttgctctagttagcacagaaatatctattttgcaagtgttatgttatgtatcccgagctacttctgaacattgtcatcatggaggtctaattagttgggtttatttgagattgttcgatgaactaaattggtggttgatagtctcaggggcaaactgtttgaattataagctggtgtggaagatatttattgacatctcgttttgtgtttgacagtagaaagctttacccattcgtcggtttttacttctgaaatgcgtcagcatgttaaccatgttattgtcatgctctgttactgatttcttcgtagcatttccgaagcaatgaggaaactactttaatagcatgagcgtggtttttagactattctgtataattttcccatgccatagtttaggtgatgaatgaactactcatgctgttctgctgtctaaacttgtgtataatcgatgattttgattttctagataatatatagccgtctgttaaaattatatggcatcacgctgttaatgttttaattgtgtaatgtactcatggctttatacttcaaaggaaattttaaaatggaacacgctctgactaacggaattaacctaacgtaaataaaagaataagtgttatatgttatttgtcccctctagcacatgctaaaatcggtggatagagagaggattacgttgtgaccattaaaaatttcaaaaatttctatagataacctaatagctgtcaccactattgtcgaacacaagacttctctactacttggctactcctccatcctttaaacatatttgatcgttcgccatattcaaaaaatttaagtaattattaattcatttcctatcatttaattcattgttaaatttaagtaattattaattcctgttctgcagggtttaatgagtttctcacggtgggatgatcatagagaaaggtggctggcctgtcagctaaccaaatctttgctagtaattgttaattgtgcctcacaactcacatgtccatgacattggtctacactgcactcacaagtactcccttcgttttatattaactttgatttttttaagttaaacttctttaagtttgaccaagtttatagaaaaacatagtagtattttcaacataaaacaaacatattatcaaaatatattgaacgttagatttaatgaaactaatttaatattttatatgttgctaaaatttttctataaacttggtcaaacttaacaaagattgactaggaaaaaagttaaacggcttataatatgaaatagagggagtaacttattaatggaattcttttctttttcatattttaaaaaaggaaaaagtatgaattatcccgaattatcgcggtcgactgaattatcctcccaaaatcgaaaacaagccattgcacaccctaaacttgtaaaaccggacgaattatcccattgcttcaaaccagaacggttttgattctatgtggcatatgtgtgacgctaacgtagcaatccaataaaaaaataaaaaaatcatgggcctcacatgtcaaacggagtactactaaaatctctcctctttcttttttccctctagtgatagggccatactcctctgctgcctggtagagcaaaaggggtagagccgcggtggagtagaggcggcggaggagcaactgggtggggcgacgacggggatgggtggcaaactcgtcggtgtagcctgccgcctctaatgccttcctcagcaccgcccgtcgcctgctcgccgaggactcatcgctcgccgcctgcctgagccgagaaggggggggggggggggagagagagagaggaggccatggatccctcaactcctcatttgaaccggagaagaggctcggcactttttccctccccctactttgagatccaagatgacgatgacaacgagggctacctcaccgccgtctccagggaagggagcattagcatcgccgtcgcctctgcctccgcctggaaggatgacctcgacgacgcccaccgcccccctgagttgaggacttgtcacctcgtcgtcatagtcgtggagcttgagagggctgcagactcgtcgccgtagcccactgcctccaacgctctcctcggcgcccctcgccatgccctctccgcgttccgtcgctggcccccacgcgccgactgcccgtccgccccgttgctgctgtgcgcactttgtgcccgagagggagagggtaagagtggaagaggaggtataacaggtgggtcccaccattttttaaaaagaaaatgctgacttgattaccacgcgtatactatataggacaaaattgctttggattgggtcgagtggattaatttgtcaggtattaaaagttttcgggttaagagaggtaattcggttgaccacgatgcggtaatttacacttcttcctttgaaaacagcactacagcagccgtgggtccgtgctaggcaaggcggtttgataaagtcggttatcctccgtggaataggtcggttcgctttgatattgcgttggacacgtgtgctagccgaattacatcgacaaaaaggagccgtgggaattttcttcccccaaatcgttccctccttctccccgcctccaatctcccgccgaaccctaaccccctcgccccctgtcgctgccgcggccatggacgacgagatcgcgcgcgcgcaggagcagcgccgcaatgtggaggacgatgcctatcctccgtgcccttcgacgccgacctctacggcggcgtctccgaccccgaccgcttcgccagctacgagacctccatcgcggccaccgccgaggacgacgacgacgacgacgacgcgaccgagccggtcaaccccgccgcccgcagcctcgcctcctactcgggccacgccatcgcctcctcctcctcgggcctcccccgcgcggcggatgaggagggtgacgggctccgcgcccgcgagggcgagtaccaccgccggcacccggtccgcggcatgtcgccggatcgccacgaccctttttctgccgcggagaccactccggacccatccacgcggacctatgccgacgccatgcgcgacaaccagcccgcgcccgcgacgaagcggcggaacagatgggaccaatcgcaggaggacgagggggatggcgccgccgctactggggccaagaaggcgaagactgcctcctcctcctcctcctcacattgggacgccgcccctgatgctgcaactcccgggatcgggcgctgggacgccacgcctgggcgcgccggaggtgcgacgccctccctgaagaggaatcgttgggatgagaccccgactccagggaggatggctgatgcggatggaacccctgcaccgtccgtggcgtgggattcttcttccaccccaacgcccaagaagcagagatcaaggtgggatgagacgcctgcgggtgtggggagcacggcacctcgcgctaccgatgctgttactcctgcaggttatgctcctgggccaaccccgttcgacgcggcggacctcgccacgccgtcacctggccagattgctcgtggcccgatgacaccggagcagtaccagctcttgcggtgggagcgggacatcgaggggcgtaacatgcctctgactgatgaggaacttgacaccatgctcccgcaggtggggtacaagattcttgatcctccggcttcttatcagcccatacgcacacccgcaaggaagcttctcgcgacgccgacaccgctgtttacaccgctctatgccatccctgaggagaaccgtgggcagcagtttgatgtgcccaaggagttgcctggtgggttgccacaaatgaagccggaggattaccagtactttggaacattgctgaacgagggagaggaagaggagaagctgtcaccagaggagcataaggagaggaagatcttgaaactcctgttcaaggtgaagaatggcacaccacaacagcggaaagcggcgcttcgacagctcacggacaaggcgcaggaatttggtgctggcccgctgttcaacaagatcctgccgttgctcatgcagccaacgcttgaggaccaggagcgtcatcttctggtgaaggtcattgatagagtgatatacaagctggatgatctggttcgtccgtttgtgcataagattcttgtggttgttgagccacttctgattgatgaggattactatgctcgtgttgaggcccggcagattatctcaaatcttagcaaagcagctggacttgctactatgattgccaccatgagaccagatattgataacactgatgagtatgtgaggaataccactgctagggcattcagtgtggttgcttctggtttggggattcctgctctcttgccattcttgaaggctgtctgccagagtaaaaagtcttggcaggctcggcacactggtattaagattgttcagcagattgctattctcatgggctgtgctgttctgccacacctcaggtccttagttgatatcattgagcatggtctgagtgatgaaaaccagaaagtacggacaatcaccgcactgtctcttgctgcacttgctgaggctgccgcaccctatggtatagaaagttttgatacggtgttgaggcctttgtggaagggtaccaaatctcaccgtggaaaggtccttgctgctttcttgaaagccgttggtttcatcatccctcttatggatgttgaatatgccagttactacaccaggggggtgattccaatcctgattagggagttccagtcaccagatgaagagatgaaaaagattgtcctgaaggttgttaaacaatgtgtcagtacagagggtgtagaggctgactatatccgtaatggcatccttccagagttcttccgtcacttttggataaggagaatggctctagatcgtaggaactataaacaacttgtggaaacaacagtggagattgcaaacaaggttggagttgctgacatcgttgggaggattgttgaggatctcaaagatgaaagtgaaccttacaggagaatggtgatggaaacaattgagaaggtggtggctcacctgggtgcctcagatattgatcgccatcaggaggagcttcttattgatggcatcgtgtatactttccaacagcagacaagtgatgattcaaatgtcatacttaatgggtttgaaacagttgcgaatgcacttggccagagggttaagccttatgttcctcagatttgtggtatcatcaagtggatgctgaacacctcgagtgcaaaagctaggcagcgagctgctgatctgatgtcaaggatagccattgtgatgaagctgtgccaagaggagcggctgatgtgtcacttgggtcatatattatatgagtccttgggggaggagtatcctgatgtgctgggttcaatccttggagctttaaaggctatcgtgaatgttgttggtatgacaaagatgacgccaccaatcaaagatcttcttcctcggttgaccccaatcttaaagaataggcatgaaaaggtccaagagaactgtattgatttagttggtagggttgctgatcgtggagcagagtttgtgccagccagggaatggatgaggatttgcttcgagctgcttgaaatgttgaaggctcacaagaagggtattagacgagccactgcgaacacatttggctatattgcgaaggctattgggccagaggatgtgttggccactctattgaacaacttgaaggtgcaggagcgtcagaaccgagtttgcactactgtcgcaatcgccattgttgctgaaacttgctccccctttacagttttgcctgcccttatgaacgagtaccgagtaccagagttcaatgtccgtaatggtattttgaagtctctgtcatttctttttgaatacattggtgagatgggtaaagattacatatatgctgtcacgccattgcttgaagatgctctgatggatagagatctggttcatcggcagactgctgcctctgctgttaagcacatggcactaggtgttgctggcttgggttgtgaggatgctcttgtccacttaaccttgtctggcccaacatatttgagacatctccccatgtcataaatgctgtcatggaggcgattgatggcatgagggttgccctaggctcagctgtgattttgaattattgcctccaaggcctttttcatccagcaaggaaagtgcgtgaagtatactggaagacctacaactctctatatattggcgcacaagatgcacttgttgctgcttatcctgcgttggacattgatgggaacaatatctacagccgcccagagttagctatgtttgtgtgatcaatgtgagtattgcttattttacccatcaacttactttatgcgttaatcatcggaaaatatgctgctaggttatgaaataagttaatattcatgtatcttatagttcatatttacttgtttgcgctctttcactgatatgcaactgttgatctatgtccttcgttgtgctattagaatgaaatggctttgtgtttcccttgatttagtgttctccaacaatgcctgcgtcatctttctggctaatggctatgctgtttggccataaggaagttattgacatgatgaattgatgcgttagtttttttctctccacaaaagaaaggatctgatgtgctggcattggcaggaagcatgtatgtgcatatcatcagttatcacacatgtcgcttgaactgggatggtatcttcattagagcttacatttaaaattatgttatttggtgttcttgtaacgtatgtctttattgaagtcatttttttgtttgcaggcttgttcctttttgaagggggtgcaatctttaagaaatatctataaacttcctctttgatctgattgactaatctttttggaatgtttgtttttcagggtaatttgatccaagttcgatgcagagttctggatttaagaacgaccacaaggacattttcgccactgagaatggattagcttattcataatcctagtatcactgtttttcctttggccataattagtagtaatgaaggtattactagtagttatgaaggttgtgttcatctcatagcttccttttgtctccagtatattgttactagtatctgttatgatgcctggaacatgagcatgtcttcaacgtttttttagatcgtgttctgatttctggagatctggccataaagccatcgaatgtttgagtacttgtgtttgacatgtggtgtctaattagctgtgttcattttaaaaacctttgttgaactgaaatggtgattatttgtttcagggttggccacagcttgtctgtctctggttcggaagatattgacttgcatcgttcgtatttcgcgtctagcctatgctgtactgattcaccttttttttttatatatttcagtaatgcagaaggttctgagatgaactggacttggatttatctgtttggtcagtgctcacacacttcaaatgttttacttcaccacaagccaaatgaataaataaacagatatcataccatcgatataatttacaagtttgaactctgctccgtagcatttttgcacgcctaacagatgcttttctttttcagtcagacgattttcttagaaatttcccatctctatttttattttttgctttctaaaagcaaaatttaataacatataaaagtctaaaatattgaaattgcccatgacaatgcttaaattattttcgcaattaacatatttaaacaatatcaaatgctctttgtaacagaaaagagtcaatgtatgtctgatgaacaatcccattgttaacttgctctgattgacataagaacatgatccattcattctttactggtccgcagcaaagcacacgggggaattcatttacttcttcaaaagagatcatccgagcgccaaaagtggcaactcgatcaatcgatccgtgtgtacgcgcgtcaggcgcccgccgcgacggggaagccgatgccgcggcgcgtcgacgggaacatggcgaagaggaagctccccgccgcgccggccgccatgggcaccgccgcgagcagttgcctcgtcgccggcgactccaccgggtagaagcacgccaccacgttgcggtccaccatggccacggccaggaacaccgcgaacgacagcgcgccgtgaagcacgtcgcgcgcgcccagcctgtacctgtcgtccctcggcggcggcggcggcggcgagccggagccggagccggagtcgatgaggcggaggctgccgctgggcgtgacgaagccgtagcgcacggagcccgtggcgtcgcggtagctgtcggtgaagcagagcaggaagcagcagagcgcgcaggcgccgacgaggcaggcggtgagcgcgcggttggcggccgtgcagctgccgtccgcggtgaaggacggcgagagcacctcgaacgcgagcacggcgccggtcgggaggtgcttcgcgaggtcggccgtgctgttcagcgccttgcagacgaggctcgcctgcgtcgcctgcgtcgtctggccgtcgtccgaagacgcgagcagcggcgccttcgcctccggggtctcctcgtcggcgccggttggacgcgacgccatgatgaacaagaacaatgcctagctagctaccgtgccttagctgttggattagcttgcttctaagttctaactcgatcggcattgcattgacacgacgtatttgaacaaaaaaccatggacgcatgcaaagcatctggattctggagaatacttcaacactagcttgctcatgctaaatatgtttgaacacgcaaagaacatttgtgattttgcaacaaagcaaagtatttgtgattttgcaataacgcaaagtatcctaattcttactcctaccagagaaatgaacaatgcatgcagaaaagccaagcccatggaaagggggaaatcaattatgctttgtaattggcgtaagttcacttcaggtccctcaatttgtcactgagtctaaaactcatccctgaccgcactaccagatataacgtgtccctcaacttgcaatacggtgtaccgatgccccagggcagtatattgttcggttttggctgacgtggcaagtggaacccatgtaggccccacatatgagccgccaactcttcctcctctctctctccctctcccctgtctttcgcatctttcatattctcaagcgttcgagcggcggccaacgggagggcagtgagcagtggttgatgggagtatagcgagtggcaaggagaagcagcaaccaacgggagagcgaagacggggggggggggggggcgaagaagggtgaccgctgacatggagaggggcagcaaccaacagtgggagcgaacagcgtgcgacggggagaagtactatcgcctggagagaggtgaaatcaccaattgtggatggcatcacggacgagccacgagacctagttcaccgtcaccctttcccactggccgctcggggagccatgagacctaggctcgaggagtcatgagacccggctcacatcgcctgccgccacctaactcctctcccgttggccatcggccttctctctatcggctaccacgcaggagagatggggaacctaagtggcagcctggcagaaagctcaggaggtggtccaccgtggaagcccgccactcgtcaccttccaatccaccaccagccgtccttcccacctgtcgccgcctagctcctctcccgccggccttctccccatcgctcgtcacgatggaaagatggggaatcggaggtgcgacgggagtccgaggcccggtggtccactgcggaagctcgcagcccaccacctttttgttcggcggttggtctagctcggtgatgcgttgctgccgcttcccttctccccgtcgtccaccgcccacctggggagagttggtaatgcgaggtcaagatggggtaggagaaggtggaaggagcaagttggtcgctgaaaatttttgaaaattcctctgtcacacatgattttgtgtgccaattatatcttatttctgtcgtacaaaatttatctttgtatgaataaggtcttgactagggagggggattttttctagaatacttttaactccttgactaatttttaaaatttaaaaactttttcatcctttggtaacatcttcaactaatgaaaaccaatgtaaatctaggacaagattgaaatccacatggtttcaataatgcgcgcttgattttaaacttaagggctgcttttcagacaatcatgaaagttaagactacaaaatatactttttcctcaaataagcaattgagttttcattctgttggccaagttggtctctgatattggtctttgattgaaagcagcagtatcttatgtacaccagtaataccgtaaagtttatcccctttagctatttaccataccattcataatgatacttcaatagaattttagtgaggttacagatttgctcttagcctcaacttttttggtgtgtgttaagagtcgtatgtttgatcatttatcttattaaaagttaagaaattatcatttgttttattataatttattttattattaatgttttaaataaaatgaatagttagaaatcaattgcgttaaaaactaaagacaagagaaagtaataaagatattgtacattatctgcaaccccgtcgtaagagatgagaactgcttgaacacatggcctacaaaatctcacattatactacgcatgacaatgatgtagatggtgtcaaatccccaacaaaacacggcctactatggtgtcaaatccccaataatccacggtctactccatagtactccctccatctcattttaagtacagttgtggtttttcatctccaacgtttgaccgtccgtcttatttgaaaaatttaggtgattagtatttttatcgctgttagatgataaagcataaatagtactttatatgtaacttatttattttaattttttaaataaaatttttaaagaagacagatggcaaatgttgaacacggaaaaccacaagtgaacttaaaatggaacagtagatgagaagcgggagagatctaaactgagatcgaaccgatatgacatgcaatgatcaggtccccttgagcagaagagagcagataagttggtggataaccccagggccacttatgtctcccaaatgccctcacatcacctccatcgttctagctctagatatggccactccatggattcacagctcttggcagcaaacacacaagagggcccagcatgtcccctatcccaaatgcattgcctttcttaccagctggatatggcatgcacagaaagacaatctatctttctgtgcatgcttagaggtccaaattttggatcaaatattttgggtcccatggcgcctggcagaagaaagaaatacaaaaattttagatgctaatgaactggtgcgtaattaatcgaaaaccatccttagactaaattgaatagatcaatttgttgacgatgcatacgtttggttgggggagtttatacgagggatggaagaggggcaaggttattaattccgttgttttattagtatgggaaatttaaattggcatattttaatccagaaaaattaagatagtacagatgacatgtatatagttgaatgatctagtgttgatgttaaacatgagcatgcttttaacaatataagcataaacatcaacaatattcacataggatggtgatcctaaggatagcatggtgataaacataaagatacttggaactaaaacatctagcaacatgtttaaaacgaagatgaaagtattgaagtacccagagaaaggtccagtattatatgaggcattattggtatggttgcctccgtcggtgttgccgttcttgccttctccagtgccgatgcaggtgttgatattggtgttgatagttgacataacattggagaggaaggagaatctgatgaagaggatgcaacgtagtcaaagcagaacaggagcagtcgtgccgagacactcaccaaaaccttgatcgccggcctatccatgcaagtacgcaagcagacggagtttcggaggcctgctcatttcgagcacccgtgcccgcctatctgtgcaggtacataagcaaatgaagtttcggaggtctgctcattctgagcacccgtgcacgcaggtgatcaaaaccagggactgtagaagctagcaaaaccttgatcgcccacctatctgtgcagatacgcaagcagacggagttatggaggcttgctcatttcgagcacccgtgcacatgggtgatcaagcgtaggaccaggaacagagaaccactaaggtaatggcctagcgcaagaacagagaaccactaaggtaatgggcctgctcattccgagcacctaggtgcgcaggtgatcaagcacatgaacaggaacagagaaccactaaggtaatggcctagcgcaagaacagagaaccactagggtaatggcccgtccgttgcaaaataatgagagactacgcaagcagacggactcattctgagcacccgtgcgcgcaggtgatcaagcgcaggaacaggaacagagaaccactaagataattgcccgcccgttgcaaaataatgagagactacgcaagcaaacggactcattctgagcacccatgcgcgcaggtcatcaagtgcagaaacaggaacagagaactactaaggtaatggcccgtctgagaacagagaaccactaaggtaatagctcgtccgctgcagcaggtgatcaagcacaatcgagagcaaaaaaacataattaatctgtcgcccgccttggcctggctcgacgcgcgcgtgtggcaatcgcgccactatctcaaccggtcaataagtactctctaatagctcattatttaagttcatatctctccacttaaatttttaaggtggtattaatttccatagtattaattataggttaatggaatttattgagaataaattaggccaagcctatttaatccaagaattagagcatttaggacttttggtgtgacggggaattcaattcaggagagaacttcctgctttttaacatgtgtcgggttaggaattgggatggaattcacctttacgatgtctagacaactctgaatagtcgtcacttcaagtcttagcccctatcgattcccataattactcctataaaaggagggactgaaactaaaaattaaaattttgggttaatctcaccaccaatttactcctctaaacttcaaatcctttttccaaagttgcgaatcaatagtatttctctaggagagtacaatactgaatgaacaacacgaatcactccacagcacacgcatgacacatgtcccatacacatgctgagggagagatccgagggtccagtcctctctagcacggagacacacaaatccatagagagccaaactacatatttgcaaaaaaaaaataatttgtaaataaatttttatatatatgttatcagcgataaagtgaaagctgaaaataaactatgataaaaaaccgcctaaaatcagctccaaatttaaggtgaaaaaactttaaatttagcttataaacataaatatgggcgaaaagatgagccggaaaaaaaaatccccaccgaggcaatccaccctacctgttcgctccaccgagtaccgctcttagggcatgtacaaagataaagtcagatatgagttctacgttatctagagactagcatcctacaacagttagagataatatggtctctaatcattaatgtatcaaaatactttttcttacttttctttcctttctttcgccaccatgcaacaaaatttgctctaataaatgctaagagtcgactttgagctgttgtcatgcataacaaccatactcctttctctttctttcatgtcatcaaatttacttgcatggcaatagaaagagaccactaataaacaccgttgtaatagccaacttatcatgatgtctctcaagaaatctaggcgtaatatgagttctttgatggctcttttatcacagaaaccaaaagaacaaaaaatctttaacaaatactcgttccgaaaccaaaagaacaaaagatctttaacaaatactcgttccgtttttaaataactgatattattgactatcactattttgatttgggctattaattacgatgaacaaaagtatttatatttaagatgtaatatagttatatttaacatgtaatatgatacaatggtactccttttagtatttatatattttttaaaaaaaagatgagtgggtcaaagtttcaaaataaatttcagtcaaaaaatagtgcttagtgttagttatttttttaaaaaaggagtaagtactaaaaatttttgcatttatgttactcgtgtaagatatgtgtgtcggggtctctcccttaataaaaacaagaatgacatgtgacagtagtttttcttttccttaaattaaaggaaggcaccttggcgtcgaaaatgactcaatttggatggtgattggtgaagctatatacatcaaaacctcctttcaaagccgtcatgatttgcaagtgatcattttccgccaataatactgacaagatactggtttcatactaccattgatggccagcctactgaattcgatcaaaatctcctgtcgttggtgtgacctggctgaaaattcacgcattattcattgtattgatcctactttccaacagcatacaaatcatcctgttttttgttcgccaacattctttgcgagataaggttgcatatgcttcagtgggtcttaaaaagaaaaattttcagagtatatattttttaaaagggggcaaaagcttcgccacttttttatattgatagagcatgaataaaatcttagagtatttacagggcacgagaccaatgggcccgtaaaataagatagcaagacactactctcatgcagtgattaactctgtgatttttaacgccccagctgtgatcttggcgatgatggtggcaggagtggaggcaacatgcctgaagattttgacatttcgttcacaccataattcccaggcgatcaggatgatcatcgacttgagggctttccttgagcagttcgtcgtgcgcgagattttgtaccaccattcttcaactgtcgcacatctgtcccacccttgcaaccagagatcggctcctttcgatcgttatatttcagcccagattcttctagacagcctacaatttgctagcaggtgtaaagctatctctgtcactacgcggcaaagggggcaaaagatgttgattggctcaccctctcttttgtagccgatctgtcatgttttagatggtgagctaggagaagaacttgcattttggaggagctcaacacttccaaatggtctggttgtaaatcgttcttgaaagagtatgatgtagaaagagtaggctcctagaaaccatagcctgtacgccgaactgaaagagtaggcagcattggccgtcagcttctagacgatggagttcttctggtcggttaaagggccaacacgttgaatcgtggtccatagacaaatgtaccggtgcggtggtccgcctctgtgtacttggaaggtcgatataccggatccagacttaagggcaagggcctcatgcaccgtcctggttttgtgtttggaggccgcttttcagagtacgtagaggcaaaagatatgtattagttatgtaccttgatttttaagacaatcgatataaattcggcctcaatatccaaacgtggatatacacaaccaaatattacaaaatatatatatataaaaagacaagactaagcttcaaatcttcgttcatgcttcaaactttcttatgtaaggacaatccagcagacctcatttgaaactttgatgtcagcatcgtatgtcataatcggccttctgcttcctaaggagtgttgccgcacaaaaactgcattaagacaatcttcagaagcagttcgaactcttgcaagcccttgccgacatcgacctatctataccttctatatatataccttctatatatatagttggtacccgttacagctaaaactcaacatacaaccatgacacattatctataatagcatatcaaatcatgtcaatcatcctcatattatttcaagtttttaacatatatattcatcatttctataatatatgagccccatctgttggcctaataagtcaaggcaaaagccaaaatttaaattttcaaacttaattttagagttgattttaagaattttcaacgcaatttctttttagcgatggcttttaagtcgctacgaatcctatcttactataaagttataacccactaactcctaaagcttaacatgcaaagatgccacatcatcatccactaacaatcaatacatttaatatcatgcaaacatgctatgttatctataatttaaaatttattttattttagagctttttaaatgaaagtatgttaaatcatcagcccacaattcacataatatttcaatatatatcttctttttttataatattttatgtacctatataagttcatcctcacttggttaatgttatttctctcttctttaattaagccatatcacatcaatcacttggttaatgttatttctctcttctttaattaagccatatcacatcaattgattttaatgcttatgtaagtttatattgtttagctattttacacattatttttagttattgttatcatactgaaatcgcatagcaacgtgcgaggtttcacctagtaaatatataaaagttttacctgtaaattaatttctattccctaataagccgttttggcttattagagaagatgggcaaccgatgaggctctatagcatgcaatcattcatgtattctgcagctaaaacacaataaataaatgacaacgcctatgggtgaaaatggtcccggaaatttccgatcgactgagcgctattttcgtataaggcgtactgtttccgaccggactgtttttggctatttttaaattttgtttttttttaaatttttttctgcatcgtattaatatcgatactaaatagtttaaataataaatatggttaaataccggccaatcgagtgtctttttcgaagacatgctaccgattcggaccctttttacccccaagtcgacgcctacaagaacacgacccggcacactgctaccgcccgtgtagaaacacaacgatgccgcctccatgaaggataatgacacccaaaagtgtcgccgtcgcctccaccaataaagctaggcagggttatcacggtcacacaactgccacaaacctccgaccactgcaccgagtcaacaaacaaaatctcgaccatttgttataaaactaacaaaatattgatcacggaagccaaacaccaaagaataccatggaagatccaagatccaaacagacgatggatctaagacacgatatttgttaacgagattcagtcagggcactgatgtatccggagttagggtttggtgtaaactattgtacactatccgggtacagagttttgcactttatacccgatgactggcagaattatcatgaaatttacaccaaaagaatgggcgaaatctaattatactgagccacgatagtgtaacagaaggtccattggaggcagaaaaactgtcatcaggttacagcagtattgtcaacaagtttgccatgttgtaccagaactaccagaaagaaccaaaaaagattgtacaatagacaattgctttggactattggtctataccagtaagcttcacacagaaccacaaacatgcatcattactgaagttaaggaacagcttgctcccttttttccaagaatcaacagcctgctctaagaaatatgatgaatctaaccatatcccaccagagcagtccataccctccaaatctcaaaatttgaagggaacactccaaagttattagactccccaaatctcaaaatttgaacatagtactacagagatgaatggcccatcaaactatgcacatcatttatgtgcgcaacctagagcagcaaagcaacagagttcctgcatggataaggacatacaattgagcaggtacaaagaggacggtatgtcatctactccatcaaagtccttacctttttctgttcataatcccaggacctgcaaagagtcagagaagctgacacaattcaagacatgagaatagtccctcacactgcctagccatccatccagcccactggtcccccagctcagctccaagtaaatttcactgagctgatcagaatcctgatcaacacaaaacagataggatgtgcaggcaggaaaagattttctagaaaatctttaccaacagttgccgacaaaaatgcaagcttcctgaatttcatcctgagtgtgccaggtccacttgtcagagagcagcaagtaaagatttgcatgatgtttttttttctcttctttcaattgtactgctactaccaacagaaggacttgaatgctattcaccaattgaagcctcatcaagctgttcaagagctcagcaatgacaaagtggaggcaagtgagaccacacttttgacttggtcctgtgctcctggcagaaagcagtgtggcagcaaatgcaagtaaatgcacaccagtgctgcagcatatgcatgcaactgggtactggagctagataagcagaagctggataccatttcattagctatgtagctggaccaacacttgactctctaggcatctaattaaagaggacagctaatcaaacacaactagataaacttgattctttaccaccaaaagagatcaatgcctactccctgtatcggcacataattagcgaggatcactaaacgcaagaaccagccaagctaccatccaagctgctctataagtcttagactccattgttgtcgttgttgctgctggtgttgttgtcatgctcctcgttagaggtgagatggttggtgccgttgctgttaccactaacatcgcatctggagctgtagtaggtatgcttcttggatgagcccttgcactggcttgctgggtacttgcgtgcattgatctccagcttgcgtagagcagcgctgccaagatcgactccgcacatgtccgacagcctgacgaggtagaggagcacatcggccagctcctcccccaagtgcaccttctccgcctcgtcccagccggggagccccttgggcacctcccctttccactggaatatctcagagagctctcctacctcccctacctgcacagcgcacaagaaccagccacagattatacacaaattacagaagataactggatgagaaaaagattgttgtgctggctgccaacttggctagggtcatggattgagctagatgccgagcttatagttcccacaattgttctcttatgggcatctcctaggtgtgggctgtgggcaacacttggaaaaaaaagggattctgctctagtaggccttttgagatggcccccaccacaatgcagaagagcacattgtggacagggtgaggtgacgtgagtgggatcctgcttaagtccaactcatgcaaactattgatatggataacctaacagtgcaaaggccaaaataggatacattgcattgcaacatgtgtatttggcagtgttcaatgtggtcaggattaaagaatttttgtttttcttccactgttgtactactgcacatatacctttgtcaggaaatggttggtgagtggattatgttggtttgaacgtaggggtaagcataagttgttctatgatattatttttattccaattttacttagaacaaaacaaaagcccttgagtccttgactagatagaacatttagataagaaaattgcattcagaaaattctagataccacaaacagcgaggtagacaaaaggttaattaaacccaaacactgcatatagtccccaaacagcgaggcagacaaaaggacacaatgccaatgtttactgtcaagttaacatcacttagactgtcatgagacatctcacagacaaggggatcataaagctcctttctgttcagtaaagcagaaaagagtttgttcaaattagcctctcgaaatcaacatctaaactttagtgttatatgatgccctcgacatacctatttctagttggcctttaccctgacacaatcgtagtaagaatacattactctgataaaccttgagatctaaaactaataactgtacaatgcccttttcaacacaatatgatgtaggcaaatgccatatccaattagaataggtggtttacatcaaatcattcagtaaagatcacagccatataagcttcaaacaatgatattttagagcaaacatgattacgcaagcataacagtaaatatgtaggcaaagtcccttgccttaggcacattggttcagagccaggccgattacgccaatagcactcgctcatccataaaccggctgacacagtattacagcggtacatttgtagcatataaaacgaagtaattaatgtaataatccggtactccactatgaacagatcaaaactattactcgcaacagagcgtaatctaccttttacccgcatataaacatccatccgatcatcagttcatcaattcatcacccactgtgtgagatgacagttttattatataaacatatcgcacgattaaagacttcttggaacactgcctttttgtatacagccagtcagccactctctatacctatctatttatccccatttcaccctcgtgcatgtcaaagtcgaaataccataaatccatgatggagtactactacttgtatacagttggtcccaaaagagaaaggcgccatcaaccattcaacctttgcaattccagtacagaaaccaacctgaaaaggatggatggactagtacgtgcaattcattctctcaagtttggtcttctttttttttcttttcttttcttggaccaagaagccaagaaaccctccgaaaatcggagtgaatgtaaaatgagaaaatcaaatagaggaatgaatttgggaaagaaaaatggggagggtgaggaggggagaagacgaaccagggcgaggaggaggttccttggggagtggaactgctcccaatccctctccctggcgaagtccgccatcctcctccgcagctcctccagccccaccgtcgccgccgcctcggcgtcgcggccgccgcggccctctcccaccacctcgacgccgttcatgatctgtgcgagagagagagagagagagagaggaatagggcggaggaagggattggtggtgaggacgctataaataaagaagagaagaatggggagaagggaggaggaggaggagagtggcggccggcggcgccattgttgggccggcccaggttgatggctacttgttctcctccgtgcatggcccatcatgtgtatatggtccgggaacctcgaatattttgacttgtttagaaacacattacaaacgcacctgcttatagattacacgtacactctcacctatataaacacacacaccatattcttataagtatctctgaaagaatattgttaccatggacatctcagctatcgacgggtatgaagaattggttagcatatcatgagattgaggaagttacgatgggctcattgctttccatgcttggcatttggtgatcgtgattgtgaaataaattgctatatcatgcggtagaagagagatttaaggagaaagaagcgataagttttgaaaataagtttagggctaatgttggaggctgatttttttatttacataaaaacacaaaattatgggattgacgaaagtagtataggatatactctgagttattatttacaatcatcatcacgtgatagcttagctaggaacattatacggatacgaactccccccaacataatcggcgtgtacgtcggcccacaaacgtgcttcaacacaatcaggatatgcttcatatccagattacattcatattatattagattgtgtcacatcgatgtacgtgcttagggagtagtcgcacgcagggtagtttgttgatgagatcaattcatgccccaatcgatgatcgaggcgcttcaattggacgacttggattccgtctttgactctagctgcttcgatttgtggacggtattataaccgtttgcaccagatcctccgcccgctggaaatctccggtccgccggtgttcatcctctaaacccgagtcaatctagctagctaaaaaccatcatctttataaataacaattaaattcgtcatgtaatgccgacaaacaaaattcattgaaaatcacaattttgaaatgttgcaggtattatttcgctggtataccgctcttaaaagtttcttaaattcatcctacgtatggtacattcctgcgcgaatgcgtgggctaccttcctagttagccgtaaatacttgaacctaggtgggctggtatcagcacaaggaacataaccagttgagttacgctcacctcgcaaccgccaaatattttggttgcgaactctccgtgcttggtatttgctggagggtggcattcggcgatcgtggttgtgaaacaaactcctatatcatgcggtgggagagcaatatttaaggagaaagaacctgggattttgaaaataagtttagcgctaaagttgaaggctgatgttatttaacttaaaaaaacatgaaattgttggattgatgaaagtaatgtggaacatgctctacgagttattatttacaatcatcatcacatgatagattagctaagaacattatacggacatgaactccccaacaccatcggcgtgtatgtcggcccacacacatacttcaacacaatcttggtatacttcatatccagatttatagtattattaggatgtatcatatcgatgtacgaggttggtttattttcgtacaagggagtagtcgcatgcaaggtagtttgttgaacagatcaattcacgcggtgagatcgatcgatcgaggcgcttcaatcgggcagcttggaatccgtctttgaccgctgcttgcttcaattcgcggtcgtgtgcccggtattataaccatttgcactagatcctctgcccgtcggaaaccttcgatccaccgtgtgctcatcctccaaaccggagtcaatctagctaataccttcatcttccgagagtacttcaaccaaaccaagtcaagccgtttgagattaattaagcacgagttggcggctgccatactagcgcagtggctgtcggacatggccgggttggtgatgagctgttgcaaccctatccctaacgtcaccaatgacggcgctggaaacccggaagctctcgccgcccaaaccatatgtaagcatccaccaattaatattttgttagatccaagtagattagatacaaacatgttgtactagattagtggaattattgttttattacttttgtttctttctttttgcagacaccgtcaacgagattgaagccttgtatgagcttttcaagaggatcgatggtgccgtcatcgaagatggcaagatcaacatggtacgccgcgtttgttcatcatgtttaactaggttataaatgcatattgattagtagaatcgttatttggtttacacataccttgaagcatgcatgcatgcatgcatttgtttgcccttgatgatggtacacatcaaacggaaattaaacacgtatgaatgaatcatgtcattgtttactcgctgcatgcgatggctcactaatcccaatcaattatgaagcctcggccgttcaatgattatttcttcatgttaccaatgaataattagtctttgatttctagccaaactgattacatggggccaaagttgaagctgcctaaagttttgaagaaacaccaaatacattcctagtatttctccattatttcggtctttttacatcaccgtcttaactaataatgtttcaatttaatttgcaggaagagttcaacttgagagtatttggtcctgaaaaaggaggcacctgtttgctgatcaggtatgtatacacttgcatgctttgatgagctttttctttctctcttaattcacctaaataaagcagatgatttttgcactttcaccctcttgtaaataaaccagctctttagtatgccacatatccaaatctaaaatggtctaaagtgctgatatatcataggatttatttacagttagtacttaggacacacgattcagtactagtgtttcagacgagataattgaagaagattgacaagatacgtaaaatgaggtgaaccattaatgtacgatcaattaaatattaattattgtaaacttgaaaaatggattaatatgactttttaaaacaacttttggatatatttttctttgtaaaaaaaatacaccattagtggtatggaaagtttgcacgtgggaaacgaggaatctttgccttcaatccgctaaaacggacacatatgatattgtcaacatgtatgtaaggacaaagcagcagactagctgcttttttgtcttgtatttttgctgttttgctttgtaggtattcgatttatttaacgtgaagcatgaataagctcttggatttaaagagtttgtagtagctttatccatcttccatctgatgctcccattgaggacaagattaattgtaagttgatacttgttcaaagtccatgtctaatgacttcagaaggaaatgatcaaccttaaccaaagaagatcatcacaatcaggatatgctctacaagttattattaacaatcatcatcacgtgatagcttagctaggaatattatacggacacgaactccccaacacaatcgacgcgtatgtcggcccacacacttgcttcaacacaattaggatatgcttcatatccatattgcattcataatattagactgtgttacatcgatgtacgagcttggtttattttggaacagatggagtagtcgcacgcatggtagtttgttgatgagatcaattcacgccccgatcgacgatcgtggcgcttcaatcgggtggcttggattccgtctttgactgctgctgcttcgtttcacggccggtattataacagtttgcaccagatcctccgcacgccggaaacctccaatccgccggtgttcatcctccaaaccggagtcaatctagctggctagctaaaaaccatcatcttccgagagtactttaaccaaaccaagtcaagtcgtctgagattgattaatcgcgagatggcggtggcgatactagcgcagtggctgtcagatatggccgggttggtgatgagttgctgcaaccctacaaggttggtttattttcgtacactagcaaaatgcccgtgcattgcagcgggtgttaaatatggagcaatttgatcgatggcattgcatatttaccgtatcgaaaaaaacaccattaatattcgtgatacctaccacgtgacgccaatgaaaacacacctttgcgtgatgtctttgaaaatcacacaattgcaaatttaccgtattaaaataataccactattaaaaccatggtattgccgtcaaatatttattcaaccttcgtctaatgacatgctttctaattttgggtctttttgaaggaggccaagcttagccaagctagtagacatctacctcatgggcgtgtgacgcgtgtctggcgacgtcactaagcgggtgtgcgcagggaggtgcaacccgatgaggtggccatgctcgcatggcgacgacatctttctcctcatctacaacaaccggtagctccgtgtgcttgacatggcgtctccctcgtccccaatgatgaggaccaccccaccaactactcgttcacgctcggcagggctgcatagtcgagagaacacaatgtgttgcgcatcaacacgacaacacgtacgctgctgttgcacgagccgtaggactgcaccgtcctcaccctcggtggtggccaccactgtgcgtggtggagctagggaggtagaggcaccaagcccaccacacaccatcgggacaggacatgggtgcacgtgatcgtctctgacggggtgacatatttcttgttgcctcacatacaacatggactagatcacggcattcgtcctcgaggagaagcaattgtggccagaacttgtcgatggcatgccgctcgctgcatggtgcctgacaaagaccggccgaactgcctccacctccgcatcacactggccgcaagatgagaggcgcctagcttggtggtggccgatcgacgacaactacatagctgccaccccggacctgtgtttcctcctttctagctaactccagcgatggcatggcgggaaatgcactggtcgaagtagtgcaccagtctctgtcgatgacgacgtgaatgtcaaggttcttccttatcgtaccttttgactggaccataccaccgccatcatggtgttggcggttgttaaatgtcgattttataccgccaacatctgtataaagttcggataataaaacatccaacatagtgataggtgcttaaatctcacatattccacagtgttggtgtatatttatatgcaggtgataaaccccgatgttgggaggaaatctagactaaagtgaggagaattctgtgtccatacaaggatgggttgtgaacttcatcaaaacatcagtaaatcaacccaaaatgccaagaaatggataaaggaggattaggggaagagatgggccgaagaccaggccagatgggcccagcccaggtttggccgaaccacagtcgttcaggttggggtttggcgtggacgctccagatcattccctgatggcggttagagggcacttcggacattttcccttcgccaaccgtcatacctacccctatataaggacatcatctcactcacttcaacacacacttccaagcttgaactgaattataagaggctttattgtactatattgtatactagaataggaagagagtagagtagaagaagtcggaagaattccggagttgtcggtaattttctcctatttcttttattctgtttattactctgaattcaatataatattcttcttgagtaatttagatttgtcttgtgagaattatctcttggttagttcctaagtagcatatgggattattgttcactataatcaactaaaatatagtgattactttggtgagttataaacactaaggtagatagtaattgcttagacgtggtgtttaggtaattgttatccagtaattgctgcgtatcccacagtacgtttgaggtgggtgtagagatggtgacagccctcaagatcacttaagtcctccctgtccgggtacgtagtagagcaacatctggtaacagcgggttgccagtgcctgaagtattgcattaggattaaagttaagctttccctagacactgttcctcactagtaaatcctctctatcctagcctatcatttgcttggtgtccttggatgaaccggaggaagatctgaccacacacgttcccttggattcgatacccttggaatactccataggggaagtgctacatcggtatatccgtgcgcttgcggattttatctgtgatcataaaaaataccaacacatggcagccattttttccttgctggcacagctggtccagaatcaggatcggcagtgatcatcttcggtgctgtgccacctacccgtgcgccatcggcgcagccaccaatagcactaccaagaggatcgatggtcatcaaagctgccaatggatgccttctcctattgccatgctagctgatcttgctcttttttggccacgtgcaattgcaacaaaagcaatgcaaagagatgcatcataagtgatattagactaaatatattggggatgtggtggagttagatggaagagattaagggtgtgtttggttgagctgtggcttttgaaaaagctgctgtgagctatggactgtggaaaagcagctgtggaaaatcagctgtggctaaagcagaagcccatttggttagaacagctgtgaaactgtatgttgtagaagaaatacctgtaatacccctaaaggtctgtgggaccgtttacatacaaattactcgtaaaaacctaatctgttcaatatttcgtatttaaaatgctaattttgaaagaaaaaaattataagtttttcatccatcaaaggttttcatcaaaatatattagtttttcatccatcaaagtgatatggtccatataaacagagcaaaagataaatgattcatacaaaccttatcaaaaagctactactacaagcctcatcatcaaggatgattccaaatgcaaacaatctttcttgctttgcttgcattctggtgaaactgaggatgcaaacagatcagagtgatgtgttacttccaaggcaatcttccactaaacaggatgcatcatccaaggtgagatgagagtatgagacacctcacctcactgtaggagactcattgaagcagaacaaggcaaaggtgagtcaggataatgagagcctgaacacactgactgaccaactcgaagaaaactacactgtactttttttttcttttttctgttctttaggcaccaaactggcgagaggctgctgctcgacttccagcgacttcgcccagaagctgctgctcgacctccggcgccgccgcgagaggctcggcttcaactcgccggcgccgccgcagagcacatcgtcgtccaatgccgccgctcttcttcgttgtccaacgctgccgcggaaggggcgggcagcatcgaacaccttctccgattgcacgccgccgccgccgaggcggccgtctcggcgaggctgcttgagctggcgaccgacgatgacgcggcgggcctcgggaagctccttgcggcgtgcccctcccccgccaacgagcccgcgccatggagcttctgaccccgctcagcctcgacatcaagaacgacgcctagcctctgaccactacagctgtgtgccgagctcggagttcgaccacgccatcgctgccgctattgccgccgccgtctaccacctcacctccatccgcaagcagccgcaccaccacccgtgcctctcgcccgaggcggctgccgcagcgaggaggtgcgtggaacgggaggtcgccgcgctccgccacatgcatggccacccgcacgtggtggggctcctcgacgtcctcgccacccgctccaccgtgtacctcgtcctcaagctcgcccgcggcggcggcggcgtcatcgcgacctccgtctccccctttcccctttccccgcaacgggcgaggaggaggaggaggaggagcagcggcggcggctcggtgaggaagaggagcggcgcacagtggagaagcggttcggcgaggaggaggagcggcggcggaggctcggtgaggaagaggagctgcgcgcagtggaggagtggctcggcgaggagtggcggcggcggggcagctcggcgaggaggaggagcggcggcggcggctcggtgaggaggaggagcggcgcgcgatggaacagacaggtgaaaaaatagaatgaagcgaaacgtttttttttcactagtagcgttgctacggggaattttgttgatcacggggggtaaattctggcatcgaaaagacaaatatggcatcgtaatgaaacaatctcatggcgtttactaaattataaaaagcaacatagatagaagacatctatgaaaatttgatgatgttatacaaataaagcacaaacaagaaatatagaacatccagtagatacggtatttctaatggatgatcacctcaaattaaatcactccatattatagttaaataactaccctaatgttgttccatatagttaaataactaccctaatgttgtgcattttttatacactttagaaaatcttgtacgccgttagggatgttgctttcacactcattttgttggtacatcagtagatttagcaaaaaaaaagtttccttagctcgtcaccatcctgcacatgtatttaataagttaaattttggtaaatatataataatgtaatatataaataatcaatgcctgtcacgacttacattaattgccgacaaatgtggttctttattattccatgtacacatgaaaagatgaacaagaaaacccgataaactcctaaggaaattgaagagttagcttccctttctctacacagttaaatttgttggtttgaacgtgtttttaagaagataacttacctgttgtaaaccggattattgacaattacttgcctccacaagttgatgtcttcattccacctagagccagggcatgcctttctcatagctttgttgaagtgatcacaaatagttatcagttttctggtgtatctcatgtttgggttatttttatattctggcataagtggatttgggtctaatacatagagcgtttgactttcttggtccactacgagcacgataaaacttcgagcatggcgtactagtataagaatctacaaaagatcaaccatcaagataatatataaaacacggccatatacgatggaatcttagcgatcttatcgctttgcactgtgaaagtttgtaatgaatttctgaccaactaccgacggtctctgcaagatttatgttgtcatggtggaccaggtctttaccaaagccagtaaccctctacatgatttaaaaaatggttcaattacataagcaatagagaaatcaatatattcgatattgcgattctaggtaataacatgagcaatagagaatgacatgagcattagaatttaaaaacttacccaaaattgcaagtccaggcaatgattcgatattgcttctttagttttatgaatcatctcgattttttcatacatgaacttatgaatagccatgttgaagcattcactttccaatggctcgtccttctttagtattgtttgaagctgtttaagactcaagctaataaagtgcggcattgaactttgtacccatattttcctgtcaatcaaagaaaaaatttaatgcatatatgaattacgattgtgtatacaatgcattgcagtggcttactccatggcttcagcacaattaatctgttggatgtagtgcagaaggccgcttatcaactcttgtttactcatcttagataccacagagagtagtgaactatattttttttacttctttagtttcattaatgtcccttgtagagctgaatttctgttgatgactacccaatataacaacatcgtcatcactatctttggtatcttcgctttgttccccggtcgtcatgaccgccttatttgttttccaacgtaataatacactggctagtttggacctaaaaagtgtaatatcctcctacgcattaaaaagtaaatttgtttaatttaaaatagataagatatttgatcaactatttttttattaagaaacacacctgtgtaatagaacgagaaagtgattcacctgtccaattctccataagtttgagcatgaatagtccacatgaagaactgcattgttttaaagtataagtacaactattaaaaactaaacaacagtacaccatttgaaatatatcattcatcttatattaatattccatgaaaaatttatttgtagtatacctgtcttcctgaattctttcttttagttgttctattattggccacttgataacattgaggtcaccccatttgtggctaggcaagtcctgttgccgtccaataatattaagatgatattgtagtccttgtagctgctcaattatcatatttgcagtcagcaatatacataaatgaattacaatcttaaaaaaaaagagagttcacatgtcatgtacactaaccgtatttgcgaggtcaacacgattgaatgtcatacacatggaatcaagtacttgtatctgttgtttttctgtgttgacaaccggtaaataccgatgtttatctttcatatttattggaataaaaatctaaacaagacatggagttaggacatatattatattatatatatatatataaataataaacttaaatactatcaaatatagagatccaaacaataccagttcatggtctaggtaattcttcactatctttgtaataaagttatctttatcttcatttactccattgaccccagccgctttcagcatgtcagaaagaaacgggttttcatatttgactttcttatcgttatttgcttgctccctcatacagtgtatgtacgcactgatgacctgttgattcaattaaaaatctgcaattaataaagaatatgttggcaattaaattgtaacgttgcttcatcataggtagttttacttacatcatcgttcaaaaatttatctccagagaaggcacgttaggtgatgtttcttgttataaaaatctcccatgtccaccagtgtacaattttcagtcaaatcttcaattaaaaatatggccattacatcctcgtctgttaattcataatctgtaaaacaaaaaaaatgaattctgatatcacaaagttttatatataaagcacaaccactattaaaccaaagaccaagagataattatgcatgcacccaataaaattagaggtcttggtggagagtttaaataataatattttagtggagaagaggtgttagttaatgacatgcatacatatatgccttatattatgaaacaactttaaaaagtaattttgccgtacattgtggaatgaagggagtatgtgaaaaccataatgtaccttgagggagatactcgtaggtctggccaaacatagatcgtatcaaatttgatggtacattaatatttggcatgctgactttgcatactccatgctcctcggattccgaatttgttgctttctttgagggtggggttgtaatgatatcagcatgaatggcgtcttgattgacctgagtaccacatgaaattaagcaaggatatctatattgcatatggaaattatatataacactggaaaaaaaacacgtcggcagggatgtcaataacatattattgtagcattagtcggtgcaatgctttattttgctcgatcatagctatcaatctttttttcttggtgaaccataccactcagagtattatatattatttgtaaaataagctgagggccaggttgattttatgttgagttatgttgttagagttattttataaaaccataaaaatatatttgttctaattgaaaactatttaattaattatgcgttaatgagtccctcggttttgcgagtgcgagagatgagttcatcatataagtaaagaagcaaccctgagaactacgcacaagctagtgtaggagtatatattaatgcaattgacatatttgtaagtaataattttttaatataatagtggatggctagctaggtgctttaattaataatcaagtaacgtacagtgtatagcattaatctacagtaccatgcattaacattagctagctaatgtactgcctgctataagtaacccaaatcgcaatagaacgcatatatatatatatatatatatatatatatatatatatatatatatatatatatatatatagagagagagagagagagagagaggatactcatatggtactctatggtgcccaggctccaaggtataaaacacacaaattctcttaaatttttaaaagttttcaaattgtgagtatatacctaggaatatgaatttgattcatactaatacctaaaagcaaaataactcaaactaacctttatttcacaatttattattatatacctaacgaattatatgtttggatgttatatacctagaaccaaaatataacaaaaaaaagttaaaactcagttcaaacttgtttgaacttgttagtaaagaagttaatgttcatacctaaacatttaaaaaaattcatactcattcaaattgggtatatactcaatttgaatattagagcccatactccatatagcaccagttaatttacctatatatatatatatgtatgtatgtatgtatgtatcgatagtcttcatggactaattaagctgggtgcttaacttaccggatcaatatctgtgctgacattgcttggcgccgaagaggacggcaagggcggcggaggaggagccggtgacggcaatggcggcggcggtggcgacgacgggactggcggctgagccggcgacgacgggactggcggcggcggcggcgtcatcgacaacagtagtggcggaggagtctgcggatgtggcggagtcggcgagggcggatttgacggcgatgcatccatcgtgtggtggtcgcgtagtctggtttcggtggattttgcgacggcagcggcgcttgtttaccagccttggtattcggcgagttgtgcggcggcgatacgacgagcagatcaaactgaatatcacgacaacgcttagcaaggaaatagggcaccagcttatcttatatagggcttaatctttatgagttgatgggccttatcaactcgaaagtgattcttgactgactaatattatataggccttaatctggatgagttgatgggccttatcacgtgtcctgggtacgcaggagtcgaggcggtttcacgcttcttccttccttcctgactaatattatataggccttaatctggatgagttgatgggccttatcacgtgtcctgggtacgcaggagtcgaggcggtttcacgcttcttccttccttcctgactaatatttatataggccttaatctggatgagttgatgggccttttcacgtgtcctgggtacgcaggagtcgaggcggtttcatgcttcttccttccttcgattattttgtccttcaatcttcgggacacttcgattattttgtccttcaatcttcgggacactgaataaatccaatatcatggttacgattaaaattagaaggaaaaaaattgagagaacaaaattgttggaccatgcacgtacgtatatctcgttaaaaaaataaagggaatgtatcacaattaaattttttggtcgatccggtccgaacaaaccggatgcaattaattaggacgtaaaatattttttcataatattatagttttggtttaatttatgtgtatgaaaataacacgtgcattgcaagggggaacatatgcatcattggaaaaccatgtgtttttttatctggttcgaacataccggacgaaatccggacataacaaatcatcataatcgaaataataggacagtttaatttatgtttctacgaccgaaaaaacaacgttaatagaccagagcatccctacaaatgttaaacatgtaaccaaaatcatgaatctaaaagcaatctcttaagcttattaaaaacgggcgatagtattctcttgttgtatcaaaggcacatctcgtctgatgattccttgaggatccaatcggtctaaaagggaagcaatagtaataaatttcgctctcaaggaaacgactgcttgagtgaactgtagagcatcctcatgagaactaacgaataaatgacgaatcacgcccaactcaggtgcactgagtgaatctgtagagttggtcaattcggagtccaccgtagtagttgatatctctgcacgataagcaagtcagtctgacagtgttcagttctattacctcgcaaacaaaatggtaaaatagtaattcattttaggatgatttgttacttaccggttagaatatctaatttcttgagccatgtagcagacatgcagcaatactgtgatacaagtgcttgccaccacactgtatgtcgagatgcatattcaccccaaattcgaagaaagattaccttatatctgtagtactaaaagtggattagggaccactcacaatatgggaacatgttatgtaaaagaaaaactgaaaatgaactcaccgacgattaaccaaggcaatatccctagtaggtatactttgtccgtaaagttagtgatgatgtatttctcccacgtatataagcacaccaacaacatctgaacgaatatttatgcaatgaacataactatagagtttaaaaatagggctgaaaatagttattgaaggttgttgctttacctatgaacatatcatcacttatcgcgtcggtaaaaatagcaccgaagtctacaaaacgaggcttgcgtagggctgtctttggtgtcagaatcatacaaaacttagcttgcatggttaggttggcataggtaggcacatcggtcggttggaacccacattagtaaaatcatagactaagccactctgtatggttccattaaaacgatctgcttgctggtcatacgctagtgcttccatccttgtatcctacgtttaaattgtacatatataataaaggcataatttccataatttttgtgcacaacgctcaattatatctagcaattaggaggagaggggtgatgcgtgtgacataccgttgcatcctttaggataaaccgaatatattgagcaccaaatttgttttgctgcacgggagatttgaacaccaccttcgcactcaccttccagcatgttcggaagacgtgttccatcttaatctcatcgaactctactgacctgcagccatgcataaagtaacggtaaacatacaaaaggaggaacgtaccctcaacttacgaaaatttgatataaaattttacacaaaatgacaaataaaagaagaataacaaacatgtgaaatatcctttcctgttaaatggttttatgattgttacaggttgagatgcatcaggcagctgttctgacgtgggggcatgaacccggttggagatgtgtgtgcgatagtttgccgacatcatgttgttgtaattgacactctattggaagtgaatcattgaagttgccaaaaaaaattgtaatattagacaaacagataacatggaaattcaatttgcaacaaacgagagtataccacaagaatgtggtggtgttgctactgctcacctcttatttcacatatagtgcagtagaaaggcacctcttcaaaattcagttgcagttgaagatcgatttgaagtgttgcacttgcggcggcagcgtcgtcgcggcagccgaccgccgatgaaaggcgcttggatgcggcggcgattggaatgcagtggatgggatgcctaggtgggaaccgacgagataaacggaaggtcggtgctacacgcgcggcggcaatctcgcggcgacaaaacggaagcagctcgtcacgtttcattgctccgtgatatgggccgatcaggccccatagcttgtatacatcctttctcagttaataggacgagtgcacagtagcatggaaaaaaaatcaaagcacgtagcttttgaagtaccagaagcaagcaacgagcgaacgatttagatataaaacaattttccagatgatgcgacgacggccgagagcgtgcggcggcgcgacgacggcgacgagttgtggcggcggccgggtgcgtgtggctgccgcggctggtcacggcggcggcggccggatgcgtgctgcggtgcgacgacgacgacgacgagttgcggtcaccggttgcgtacggggcagaaggcgggcagcgattttcgtgttttaattttttttccgagcaggctgtatcatttggccgcgcgggataatcaactatgcagtgtggcagcggtcgggtgtgtgcggcggccgcggtagcggcggccggatgcgtgatgcggtgcgacgacggcgacaacaagttgcggtggccggatgcgtgcgggccagcgggcaggcagtgatttttgcgttttaatttttttccatgcgggcggtatgatttggccgcacgggttaatcaattatacagtgtggttgggccacccaaccgtgaaaatatatagttttctagacactcaggtacatacggtcaaatcctccactcggaaaaatcatcttgatcgcacgtaaaaaatgcttttcatatagattcgtggacaacattttatatgagtggcaacaacttttgtatcatattgagattgtaaaattgtgctgcttattctgagtaagcaacaaagttgatgacactataaaaacttggaagcgaaaaatcattatttgtatgcgaaataaaggtaactatagttgccttcattaaaatcttctagttttggcgttgataattatgaaggtttcttctagcgatagactcttcaacctgctcttgaacattagaaggtgatacttctaacgcctggcgcagaacattgaattcatttgctgatgctgaatcaggattaaaaattatgtcagattcataagtagttgatagttcatctgcaaaaggaaaaggtcagttagtttaaaatatgtgatttatcacggtggcaaatatgttagagaaatagaggggggcttccttacctgctcttctgtccaccctcgtcagcgtagccacaaaacaatcgaaatgtgtccgtggtgagcgccacctagtcaagttgcgggtaagttgttggtcccatacacgaacgaaaattatctgcaacctgatttacaaaaattgtatgcaacatgagtgttgtgtgatctcaattaattaatacatgtaaagaaatggagcatgtcgtacctaggattaaccagcgcgattatccttgtccgacgcaaatacaaactcctgaactcaatgtccacgacatgcacaactaatccaatgacatctgcacaacccatagacacattagtttttcatttgctagcaactaaacaaagaatggtatttttgtcagtaccaaatcaaacaatatacctactaaagaattgtgccttgccaaaaaaatatcatcatattctggaaaacgccatggacaacgtagcatgtggacatgaccatgaggcgtgcgggtagttgttgcactattgagaatcatgcagaagtgagatcttatcttaaatcttagatgcacgatcatttccgtcggatcaaacccgacgttatagaaatcataaacagatccacatcttaaaagctggttgaaatgctcagcttgacgatggtaaacaattgcctccatcttagtgccctacacatgttatgagatgtaagactataagacactaaaaaaattattgtcgtaaaaatcaatcaatcaataaatataaagattttagcttcggcgtgatctgattggctgaggtgataagcaatagagtgttgacatgcactgagaggcttgctagatacagtgagtcacaatggaaataaactacatattagatctaaaattctgaaaaagaagattgaaaaatcattttgacttaccaattcatcaattagtattaaccgaatttgtagatcgccgtaataattctcttgcagatgtcctttcttgatgaccctcacacggacaatccaccatttccagtgtatgtgatccatttgtatctcgtggaaccgaacaattctacatggggaagacaatatacacaatatgatagcattgcacaatccatcaatagaagaaacaatagaatgaaggaagagtgacctccatggttgaacggctacgccattctccatcttgcatggtaatcagccgttcggaagagacgtccggaagaacgggtggaaatggtggcggctggcaacaagagctgctggcgccatttatgtgatgattgttaactaatcacgattagcgttatcttgccgtggcgtcaaaatcgaatcaaataccaaaaaaatcgccagctggctgttggctggttctggcacgtcgaaatcgaaacaaacacccaaacaaatcgttggctgttggctggttctggcattggactttaacagtcaggtcatatgggtcgattaggcccataaggcccatagtttgtttcctttatcaattaattgaacattgagtcacataaacaaacaatatatccgtgctaacggtacggtgcaattatataataacacaaataataaaacaatatcagcttcgtctctcttatgcttgaaagctaaaattaaaatttcaaaacttaattttgaagttgaatttgttgtattttgttgtagtttattttacagtatgccctttttaatcggtaaagacacgcatatgaaaagttttttcttcagttgctaatccacgagatagattaaagattaatataaagaaaaagagagaaaagataaaattatttagcactaaaatatcaccatattctagtatcatggaaatgcaatgcaatgcatattttcctgtactcgtaaaacatctaattccagattactccatattctagtatcatggaaatgcaatgcatattttcctgtactcgtaccaaatatgcaaacacgctcaaatctaacttgtcaaagcttggaaggctcaatccaagagagctatgattttcaattagtcacaggaactccagtatccaactttctttttttaaaaaaaacagtatacagtatctgcacaatagcttcatgccaaccaatgtaacttcaaaatgcaaccctctcaatccaacaccagtatctagtatctacacaatagctttatgctgactgcacgcatctggagtcagtgctgacaagcacacaacacacacacaggcaggcaagcagaggtaatgcatcagtttatagaagatccagtaatcagccataagcaaaacaatggaattgctgatgcttataagcatcaggctagttctgctgaaaagcagcagcaactgcaaaacaatggcgcctaaatacactattgtcggagcatattttattccttacaagtaaaatcataggcaataccacaatatgctaagcttcataagtcaaatttcgtatagatgaaacggcgtctgcggagtagatcggcgatgtgggcagcggcgacggtcggcagcagctacagaggagatcggcaaggcgggtgttgctggcttcggtggtcctcgaggtggatcggtggtcttcggcttcagcggttgtcgttaggggcgaggcggcgacggcgtcagcgtccctgattgacacaatttagtttcttagcccaaacatctaggcattatgtaccaagcaaaaaagaaagatagtaggtcagcagatcagagaaccatagttgtaacccactgaattcctgaaacaaataagtaaaatgtacagaaattaaatcatcaagttttctcacaatctaattccaactgatgatatatcatcatgcaactaccatctgatcatgagtagcagcaacataggtatgtgcacagataaagagtacaaaaccacatatggtcaaatgatccgcgaaagataagaaaaatgaactaaaatgccactgaatgtctaaaatcagtaaacagagatctataaacaaatacaagttctattatacatgcagttgcagagtgtatgtcaagtcaaacactgaccaaataaatattattaatatataatatatgccatcagtccacattaactatatagatgcccttatttgaccaaaaatttgatcatgcattcaaaaggcataaatgggttcacaaacttgccatctgttagcttaagggcttctttggaacatatgactttacaaaaattagttcaaatctggtaaacttcctcctctccaaagaagtcctgtatggcgattgaaatggaattgtaagttaattttatacaattacctactgttaacaatgaatgttcatcaggaaggaaatttgtgctagatgcatcccttcactatttcttgcacacgcctacaatgcttccactgggtctatccatcttgcatatgaattgacaaaagtgcagaaatggtcagagaaaaaacaaaaaatgaaagaaatccacaaatcctaaatgttaaaataatagtggtccctatagtccatcttgctttgtcaacctgacaataatagatcaagagcataataatgttttgctcctaatccaggcacagcaccccatcgccaaagatgcaatccgacatcactgatttgactctcttgctagaaacatcaaatagtttggcagaagtgagcttagcatgagcagggaaaactcgtaccaaaataatgttagaaacaaaaattctatatttttttttctttgataaagaacaaagttttatttgatacagtaataggctaatagcatgagctcaaatgttggctttcagttcagatgatctccactcaagtggtaattcagtaccccactggaaactggactgccacaacatgattacaagaaatgctaaactgcaattggcttctctcctcttagcaaagaataaaaaataatgagcaagggaagagctgccagggtggttcaccctcgactgatagaaaaacatctttacctgatcacctgcaattccttggcgagcagccgactacaacggttttggtctctgaatcagccatgatgaggaggcggcgggagggactgctcggggaaggagtggatgtaggcataacaggagaaggggcagaccaagaaagtaatgttgattcctgtccaagaaaaaaactcacgaaatgttagacttggaatataaaatttacagtaagaaggaatttaagcatattgtggatggttaattagtcacataatataccttttctaatctgtgaggacctctctatacacaatattttttgtgtatgttggaccctgtttagacaattcctttcctttcttctcattgtcccttcactccagtacgcttagactttttcttttgtttcttgtcttctacatgcatcgatagtattttttatgtttgatctagaggttgctctagatagcgcgacatatagttgaccatgagagaagacaggctctggtaagtagacgcctgcatttggaatcgtttgaccctgcgccttattgatggtcaatgcaaagctcaatctaaccagaaattgcttcctcttgaagcgaaacgggaacatctcatcatcagaaggacataaaggtattcgaggaaggaaaactctctttccagcatgctgccctacaacaatctctgcgtcaatagcattttttccgaactgacgaaccaccagccttgtcccattgcaaagtccgttggctgggtcaatgttcctcaaaagcatgatgggacagtttatcttcagcttaagcacatgcggaggtagcccatttggagttagagagttcaagaattccggcgggtaatagttatgagggtcatcatctgctcggtcaaaactatgatatgtcatcacatctcctctaaaccgctcaatcatcttcatgtttattcgatcgacgaactcattcctagtggacaatatggccctacatgtgatgtagtttgggtccgtcaggttatcgtttaggttagggaacacggtatcgatgagcctttctaggtccgtttcattccctttgcacgacacgcaaatatccgaaggaaggcctatgagtccttccttgttcacctcctcggttccattcccaactcgaaggaggtagtccgcaaaccatgcatcgctctgcgccctcatattgcgaacaagcttcaattgaaccttacaatcccaaagataggacctgcgtagagtggcatctgttatctgagacctagtgcccttcctaatgaccgggagcacctgcctgaaatcccctccaaacacaatcgtcttccctccaaacggagaacgtggacaacccattatatctctaatgctcatatcgagggcctcaaccgcttgcctctttgtcatggaggcctcatcccatattataagcgacgccatctggagaagctttgccgtcccactttgtttggtgaagctgcaatacgacccttcctcaatgttgagggggatcttgaaccgcgaatggcctctaggcattatagaagctgcaacacccgacgtcgcggttgccaccgctatatcaccattgccacacactgtagctagtagcgccctatataggaaagtcttccccgtgcctcctgggccatctacgaagacacgctcccctgagcactaccaaccgtgttcatgattttattgaatgcagacctttgctcatcattgagctggtctaggaggtccatatcatctctctcacaacaatggaagactcctcaataatctctctgggatctcctcgagtactatcatgtgattcatctatttcagggagcgggaacgatgagatttccttacccattgattgtagcataccccggatttctatcaacaccatctgttggacagcataagggcatgcgttgttacgcctgtagtcatctgacatggaatctagatgcttgtcccaaagtgcatggacatcggtaggttcgcaatacaccaatatggtagcgaataacctgcgtagcgacgctggcatctagtagacaccggcttccgtaaggcactcgtcgagggtgttgtctgcctctataagaccccttctttcagctgcagcacggaacgacggcatgagcacaccatcaacagtacgtaggtcttcaaatgaggtggatcctgccaagtggtttagaagcacccgaagatagtagcgctccccctctgctgggtgggcacatacaattctcccgacctggccacctctatctcttttcttccagtacttacctggcgtctgccaagtaaaccacattgggaaatctctataaaggatatctcgagcccaaacatgctgcctgttagcctcgaaatacgccgtaagcatcgatcttcccgcgtcttccttatccagaacttcacggagatccttgtctgcatcgaaagccaacatgtgcatgtttggcagatgcaattgcaactgcctcacagacggcgagatgtggcatatgtcaaaaccatatatacgccacaaggcttctggaggggtaacccacctcacatccctgtagcgctgaatctcatcaatttcaccgtttttatctgcctcgtttatggatatcgaggccttgtcatgtcccttgtaaaggtatttaaagaggtactttacagccttgatgctcgagcaaacctcgacattcatgtgacagttgtacatccgtagaagataaggattgtatgggacaacccacctattatcgagaggatgtcctctaaccaccttactcttaccatcattacgtctcctatacaatgggtatgaatccttgccttgcgaggttgtggggttgaactctcatgggtagttgttcctgcactttccatctcgcatgcattggcaactaccgttgagtcgaccacaagggccatgcatcatatgcttgacaaccatattgtatagctctggatattttttcttgtccggtagctcagctgagacgatgcggtcatattgctccgcagacgttagcttgtatcgaccactcatgatcagcaaaaagtgtgcgtgcggcagacccctcttctggaactcaacaacatatacgtgtgcaatgactttgccaaggatgtgcttctcgaacagctgcttctttaggtcctctaacttggctcgaaagacacggaccacgagatcaggacgatcttgtggtgtctggccaggatcaagctcacgagtaatctcatcccacttggggttgctagtcattgtaaggaatacatttggcttcccgtacttctgtactaaggccatggcatccatgtatcgacgcttcatatttcggccaccaccgatgaacgacgctggcaacacagttcttttgccgaccgcgcttgctcgactctccccagcttggatgctatccatcaacccttgatacaggtccgcccttatctccttctggttgttcctcacatagtctagacgagagctctcaaccttgatgtacatgtcaacggcaaactgctggaacaggcgtccgccgtgaagtataggattgaaaattccacgacgcatctggaatttatagcagtagtagtcccttatagagacttgtatcctgctgttacaatctacacgtgacaaacatctaggttagtacagtcatgtaacacataatgatcaattctctaaggcaacatagtacgaagataaacttaccaggatcatcgccattccgcgcgtttgcatcctccatggttattttgtcctttggaaggccttgatgccaaccactctctcctctagggaagaacagagggtacgagaggggatcataacatccgtagaaaggctggatagatttccgtgtacggtcgttcccgtatattgtcacgctaggcttgtcacgcccggaatttctatccaaaattccaaacgcttccatgtgtgtgaaccctcgtccaggaatcagccgaggcatacaataacaaattgataatagagtacaattattactataattaataagcgaataaaatgtcattacagaggtagatagttcctctcaatcaataaagatctaagcagcagaaaataagataaatggcgcagacgactccactccacaggcagcttgaccaaggctacacctaatcctccacaccatcagcatcactgtagaactcctcctctgatgaatgattgcaaggtgagtatatgacatactcagcaagtcacgcagcaaatatgcaagtgcacaggataacaaaggatggcataatatggtttcatttgcataaatagcatttaataaacatttcagaatttcataaaacagtaaagtatttaattaaacagtattaatccaacgctatacaacataccctgttgcataggcccaaccattctgaacaaccaatcccggctgcacagttctatctccaaaccaggaatataccattccaaaccaggagctaaacaagttattaccagttatagcaacttttattatgatgagaagtgtgagactaatcacgaaagacattgttagacccacccataaccgcgggcacggctattcgaatagttttactctggccagaggtgtaccactgtacccacaagacacagccccacaacatgtcaccatgcgcctcaataccaccacggtacctcagaaaggagctgtgacagtacccctcgcacaacacaatccaccacagtgcaccgttcctggatcataatcacccccttataaaacaaggcatggactccccagcgacccccgtgggcttatctccgccacttctcagtctggtgctccgcaatgaaccatgctatacaaaaggtaaagccgttgcccacgctggcttgtggttggcacggttaatgtttcacaaccgaaactcgtgaaccggtccttaattgtcatgagcacgactctcaaaaccatgtgctcacaacccacctttatcaagttttagttggcaatttaattaattaactaatcacgattgaccatcgtgagctatcattaagccatcattaaataatagtgaatcacaaattatcccaatagtgtgcttatgtttctaagcatggctaagcaatcatatctaatatctagctgaaccaatatataaagctcaactagtcaagttataataacccaaggtatcaaggaataaagtaatcaagaacaaaagggctatatcaaacaataggttaattccacccaatgacattcgaaaataaatgcaatagttgaatagaaacaatagctttaaataggatcaacatgctcaaagggttgtttgggatctgtgtgacttgccttgctggctttggaactcttcaaattcttctcctgcgaaaacggactctccagaaacgtcggaatctaaacagaaaagagcaaaatcaccaaaacagaacataaacaagcatgaacagtacatgtggatatttttaacatgtagatctcaattttagaaaaatttagagacttgaaccaactaaatccgagctaagatgaattagttatgaatttttaaagattaaatcggattaaaacacttatatggattttaattgaattatgacgcaataatgaattatttttgaaaagaaaaaggggattattgcgtcatcggctagggttcgcggtggaccgggtgcacggcggcggctcacggaaacgaacggccgagatcgatccatccaaaacgaacggccgagatctatcggtccacgaccgatctacggcagacggcaacgatgacgtcggcgatgacgtcaccaccggcggcggctcgggcgcgcaagctcgccgatgaacgacgacacgaacggagggcaccagtgcgtagatggcgacgcggcgaactcaccggcgaccaaaacagcggcggaagatgaacggacagcgacggcgacgaggaagaagcggcgacgaccttcggcttgacgacgacgacggcgctccgacggtctacagcaacgatggaggggcggacgagaacggcgacggcttggcgaacccggcggtggccttcccgagcgacgacgacgaccggagcgacggcggcgcacagctggacaaacggcggcgacgtttcagcgatcttcggcgaagaaaaaccgatggccgggcttcaccttgctcctgcgaacccaatggagtcgacggcgaccgagggcgacgacggacgacgacgaacggcgcgactgaagatggaacagattggcttcacggtgacgacggtgctccgatggcttgcgtcttcgccgaggtggctgccgggcttctcctcactgctgcgatgccgacagtggatacggcgaggtccggcgaccacggagtcgacggcaaagctttgccggagatcaaaacatggcaacggttcggccttcacggtgacggcgacttccggcggggttcggcgcaaaagaacgggtggccggggtagagctcttcactgcgaagccgaggaaggtggcggcgctgaccggcgacggccggggcgacggcgaatggcggctggagcggcggccggaggtggagagagggagagcgcggggagagcgattccggcgacggcggaagatgggacttgaggggataggtagaggacgactagggactcctttatataggcacgggagctcgggatcaagcccacaacgacgggaaaaactcgggaaagtctagggttctcgccggaaaaaggaaggatttgatccgcgaaattgttaagaatttccatagaaaattttggggatttcttggggaaaaggaagaggagattgaggggattccattcccgcaactaatttggaaagaggagcaacggggaggtcagattggtgggaggaggcggcggcactgtgcacgagcacggctggctcggctctgtctggaggaggaagatggagtactgtagcaccagggagttaaatcatacttttctgccggctgagaggagaggagggaataggagggaatgggctgaattcggcccaagctgaggaggagaatttttattactttttcaaataaattaaccaatgagatgatctttcaattgttaaaaatactttcaatgctcaaataattccaagaaaaatcttgaacatacttggaaactcaaagtatttaaaaatattaaaaccagaccatttaatgattaatttattaattaaataattactgaaatattctttgtattattaaaattaggaattgagctctgaaaaatccgagaaaatttcagagagtataattaatcatagagaacttaataaaaattaaatccaaccatgctttatatttaggaaattttatttcccacatttaacttcacttgtaaattaatgaacatttaatataaattcttttaataatttattaaattatttataaatcctgaaacgaaaatcaggctgtgacaaggctcgaacttccttctctcatttccctcaacctagacagcagcgacctcaattgccaccggcacattgtaacgcctttggtccaacctatggtccagatttagtgtcacgcgataattcgcgaggtcttcagcctgccctagacttctaaatgtctccgagtacgggttgttccgaaggacgtctgcaacagtcctaatcacatcctggtcaaggctaggggaatgttggaatctatgactcaatgttggatcgtcatcgtagaaatacagctcaagatgctctggaccagaatctctaggactgaaagaatgtatattatgacatatctgaccatgagcccgaaaagtgtacacgcccgaactcatgtttgcaaaggccttgtcaaggcttacaccaagggtagtgaatgagaagtggccgttgaagtatctaatgttatcccggaaatgcttggcgtctggatccgagcttgtccaaagcctcatcagttcaggcggtgtttcattttgtacaagattgatcttgccatcccgacaacagaagctcggcggttcgtactggaacctcttggcaccacagtgtttacagtcaggttcaggcttcagaacatttgtgctttgtggaatgttgctatagacatagtcgaacggatcaggaacagaagaggtcggcgattgcgtgtcatcgtcatcagattgtaccatgtcgtcatcctcatcgtctcctagtatggtttagcgcaaacgatttataggccgcaaaaaatatacatgtgaaagagagacattaagatatcacgacgacgatacctagcccaacaaacatgtagtattcatcgtcggagtcatcatccatgaaggaatccatatcatctataattgaatgaaaagttagtatgcggaagggttaaaaatgtgtatacgaattaaaacattgatcatgtaccatcatcgaaggtgcatgatcgtgtacgatgatatgtagaatgctcagtttgcaggctcgatgtagatggcacatcaccggttgcttccaagcaaggctttggatttagcaacgacgggctagatccctcagggcactctagtgcaatcgattcagcacatggtttgtcacgcctagctgcatagagtgcgttatgtcgtgccagatgagcagatctttctccaggagtaacattttgtcgacttggtctacgacgagcattcatatcatggatttccacatctggcatagattgccttacaaccctacgactgtcattcaactctagtctctgttcatttgttagtgattgacgtcgtgttctctatcggtccaccttagcttgtttttgctccggtgtaagagttgcaggcttctccctagctcgagctagctttgactgcagtcgttgttttgtctgattggttggcgcacgcaccaattcattctctagtgatgtgccaacatcatcatgagtgcatttatgggctttttttctcacttcaattcaaaaattttaaaagtatgaatagataataacaactaacttaacgcacatctcatatgtaagcaaagaggttttatgttgacaagtggatattaaaaaacatataatgaagttaaattagtgttacctagagagatgtcgtcatcatggtcgcactcatttcgatcgttgccttgaaaaataccggattcatgcattgggctatgggtattttggttcccacttgttacgattggatcataatgattttcacatcctgttgtaacatagagtcagtaatatatatttaacacaaaaatttacaaacggtaacatcattgtagtcccattcataaaaagatgttagcgtacctgaattatgaacagtgaagtcagcactattcatgtttagggttgttaattgagtgacgcgactcattggaacttcgttgggaccatagtgagctacattgttgatgattgtaaatgggagacgtctgggtgtgatattgagatgggaagcttctctttctattaaaacatagaaccatcaatttccactcagtcgaataatatattgttcaaccaaagtgtacaaacaataaagacattacttccttgatgcagtgtggaagaatcattatcttccaagtggcacttcattatatcaacaacacttatatttgaaatatcgccaagtggggctgttcacacggtgagaaaatataagattgtttcgcataatttttaggacatattttaatttttacagatacatattacagatatacctgaagcttgagtttcctcttgagtttcctccttctttcgtttccttctttcacgtgccttcttgttcctatcatccttttgctgtggggtcaatgctgcgtagcggtctcgagcacgctttctttttagttcagccacagtaaggtcactaacatcttcatgcgaacctgtgcacatatgcacattgctgggtgtattgaaggatgcaccgcggttttctgcacatggatgactattaggcgtcaccacaggatgcacaacttcatggccagcatcacaagtatataatcatcacattggtgttggtggatacagattgagatttaattaaaataggaaacaagcaatatggtaaaataccatttgaagaagttggactggcacttaacgacttgtttccacccctgccccgtctatttgtcaaaccggaaccacttatatttgttatatcagcaagagggcctaagaaaggaacacacgagtgaaattagcatgcaaagaattaatatgcacagcacattttcccggtttgaacatgaatgtatttgtgtcaggttgctgctaagaaaaacactacatacaaaccaattaatttatgaaagaatggatcaaatgaggatatttttatgtaacataagggacgagaggttctcttccttttttatttatttctttttttgtgaagctgagagaggcccccggccccagctccctcgagttcatcattcgagtcaataacatgcacaaaactaacctgtttttgtacatgattgtgtagagcccccaagaatgttatccatttctgaaaaaaaaaatagagatgatagatcaaaaattatgaaggaaccggcatatcaaacaggtagatattgggaattttgattaggctatttgtctatagctccaaataatttaattgatcaagatttccttctttgtttttgtgtgcagatttggagaaccactgaataatttattaatgtatttctgcttttcgtgacggatcagtgtcgcccaatgaaggtaagcggctgacacaaaaattattttgtagtaaatacaaagttatcccacagaaatcatgtgtcttttatttaagcaaacattatatgtatcggcagcaaactacctgcgatacatagattcttttttttttgtccattagttgtgttgtcgaggaacttggctgcaactactgatgttcagagcatcatagaagatcaaacagtgttagagtgcgactgtctgttggctgtttcccctgtttttagtttgtgattgttagtactgattttagccatgtttatagaattcaaggagtgaactttttagacaatgtcagcacgaattttgtacacaatcataatcttggtcccctcaactaactgaactatcgtttacccaagttttttgcatctccactattgtttgctgtactaaattaatctgcagagtttcatccgattattacatgtccatcatgcagatgattgcctcttgaagcatatttaagtaattcaacacctaatattattttgatgcaaagaaaaaacatggaggattcatatttcagaatgatgtttaacccagtgtacccaattgatcaagattttaaatataacagtagctgattttgtgaagatgtgactataatattaaaccagatttaccaaaactaccttcaatttatgcatatattatcaggactgtcaaaatactaagaaattctagcaacttttaactaaataatcatatccagcaaaatgaagtttttatccctaaagggtgccataaagcataaatgtcagtacctcaataacacggccaactatgatatcaccaacctccggcttatacctgaaaaggtcagagagaaaatggagtaagaattgatacgctcattcagatgaagctcccctcgcttcctctccaccaacagaaatcacacgagcaattcttacattcagatggtccagacaataaaaaccagaaaccaaatagttttaaataaaagtagctaggacattgtattttggtagcataactcattacgaacttgtaaataattcaaagtatgtctcttgcatggtagcaaacttttaatgaattcataaagaagttgtaatggtctgtaccaatcatttcgacagccaaaatagatgaaatctatggtttgatttggtgcaaattacaggctcagaacaaatccagctgcagcacagtatatcacaagttgttagcacttagcactgccagagtgcttggaatttgagtccataatccccattctacatatactccctcagtccatcaacatccaccccacaaaatctactactggactcgttacaataacataaaccccgctctcatcttgagataaacctaacttttacctttgtggagcgcgatgcgtgggggcacggcgaagaggaggacggcgaagaggaggggggcgcggcgaagaggacggagcggtgatgggggcgccggcggtggaggcgcggcggggcacggtgaagatgggggcgccggcggtggaggcgcggcgtggcgcggcgaagaggtgggaggcgcggcggcgaagaggacggcgcggtgatgggggcgccggcggtggaggcgcggcggggcgcggtgaagatgggggtgccggcggtggaggcgagtcggtgtgcggcgaagaggcgatgggggcgacggcggtggaggcgcgtcggcggtgcgcggcgaagaggcgatgggggcgacggcgatggaggcgcggcgaagaggtgggaggcgcggaggcgaagaggacggcgcggcggggcgcagcgaagatgggggctccggcggtggaggcgagacggtgtgcggcgaagaggcggtgggggcgacggcggtggaggtgggaggcgcggcggaggaagatgcgcgaggcgtcggcggagcgcgatagttgctaggaaggaaatcgtttcgcggtggaggaaagccagaaaaagcggatcgcacgcgtgcgaagcgatatatcataaccgtccgatgttccgatccaacgggttataggacgcgagtctgccaggtttggcttcaccaccacagtacagaatttttaagtagtaaagataatagctgaggtgggtaatttttccccaaaagcatgtgaaagcaggaggtagaggtggttttgatttgtaccacaccaaaagctagctttgggcaaaagcagctatggcttttgggccctttggttggcttctagcttttgcaaaagcaaaagcaggttgaaaagcccaaccaaacacactctaactagtgattgttgatctctactagccaattaagcaattatgcagtcactgaggttgggttgctgtggacggagatggccgtgaccgcccggcgtgtgtggcatgcttgatagcagcagtcgtggccaagtcctctgagagatcctcgaccatgccagtgtccacgatgtagtccatgccttagtgaaggtacccagaagaggaggcatgcagcacggcaaccagagatggggcggtgggtgggaaactaagaacagatcaccttcagaggcgtccaagcggtcggcaagaagggatcaccaacagagacaacgaatcgatcagcaagaagggcaagaatcgattagcaagcgataatcggcacgggccgttttgccactattgatgtggctgtggtggctgcgagagaccgaaaaaaggatggcgggccacttcaacatgtgttgcaaatagaatcggaacggggcaaatagaataaaaaagcatctgggatcatggctagcgacatgcagtcgcatgcaaacggcaaaagcggattaatgcggataacactacctaggtgacgcacgatagttatataagaagggactagtcgcatgcatggtagtttgttgaagagatcaattcacacggcaagatagatcgatcgaggcgcttcaatagggtggcttggattccgtctttgactgttgctgcttcaattcgcgaccgtgcacccagtattataaccgtttgcaccggatcctccgcctgccaaaaatctccgatccgtcgtgtgttcaatcctccaaaccggagtcattctagctagctaataaaagccttcatcttcgaatacttcagccaagtcaagtctgagattgatcaatcgcgagatggcggcggcgatactagcacattggctatcggacatggccgggttggtgatgagctgctgcaaaccgtgatgagttgctgcaaccctatacttagctacagcaatgatggcccccaaaacccggaagctctaaccatccaaaccatatgtaagcatccaaccaatttttattttatttttagatccaagtagattagatacaaacatgttgtactagattagtagaattattgttttattacgttttcttctttctttttgtagttgtcgccaatgagatcgaagccttgtatgagcttttcaagaggatcgatggtgccataatcgaagatggcaagatcaacaaggtacgcacgcgtgtacatggtgtttaactaggttacaaatgcatgttgattaattagtagaattattgtttggtttacacataccttgaagcatgcgtacatgcatgcatgcatttgttcgcccttgatgatggtacatatcaatcagaaattatacatgcatgaataaatcatatctatgtttactcactgcatgctatggctcactaatcccagtcgattatgaagcctccgtcgttcaatgattatttcttaatgttaccaatgaataattagtctttgatatcttgccaaattaattacattgtccaaaattgaagattgcctaatgttttcttcatcgatctttgcctgatcactctgttagttttgaagaaacaccaaacacgtgccttgcattttctttgtcatatcggtacatattttgcatcattgtctttcaacttgagagtatttggtcccgaaaagggaggcaccctatttgttgatctggtagtatacacttgcatgctttgatgagctttttcattctcccttaattcgcctagaatgaaccagaggatttttgcactttggtcttcatgtaaataaaccagctcttcagtatgccacatgtcataatctaaaatgtcctaaaatgcagatatctcatgactcaaataggatttatttagagttcggacttaaggacacatatgattcaatactagtgtttgagaggagatgatcgacgaatgttgacaagatacgtaaaatgaggtgaaccattaacgtacgattaattaaaaattaattattgtaaatatgaaaaattgattaatatgactttttaaaataactttaggacagaatattttttttaaaaaaatgcaccatttagcggtttggaaagtgtgcacatgggaaacaagggatctttcccttcaatctgttaaaacaaacaaagatgaagttgtcaatatgtgtgtatggacaaaggagtggactggctgcttttctcactatggtatttttgccattttgctttgtaggtattcgatttgtttgacatgaagcatgaacaagctctcggatttgaagagcttgcagtagctttatccatcttccatcctgacgctcccattcatgacaagattaattgtaagttgatgccagttacatagtttatgtctaatgacttcaaaaggaaatgaacaaccttaagcaaagactattatgtccattctcaactgattggcactactgaatttgactactcagacttccagtgctaacaattgttgacatggtaacacaaagatgaaactgctgaatttgaaaaaaaaattaacatcatgagaaaatagtatcttgattttatgatgtcattcttagtttcttgtagtcaagaggttcatgtatcctatttgagtatatacatggacactccaatttgtaatattgtccacattttaaacatgtcattttattacttgattttttccagtaattatccagttctatagatgctatagtttgtcaatgagtcgagctttaataattataccattttgcaatttctttcatgttgtacaacatcaagaatcaaggttttattgaaagacacatgaggtactttcttgaccaagttaacacacaacttactagttcatagaagagctagagctctgttagtagttggctacttcaatgttttgaatttttcaaccatcagctcaaacgatcggaagtttgagagtgaattgaactagtgttgtcaataatcacacaatttacatgtgtgtaatcttagctgaagcaaatgatggttgccatactggctgaatcagatctgaaccatacagacctggtcatagaaaccatcattgacaaggtgtggattccatggctatttgtccttaaattattttagttcctttgcaatgtttgaactgatgcaattttgagacatgacacttactgaattctctcaaattaaatgttaactgcaaatatttttccactatcatcttaagacatttgaggaggcaaatacgaacaaagaaaggaaaattgattttgaggagtggcaagcacttgtcaacgcccatccatgtttaccgaagaacatgactctgacctacctcagttagtaagactctcctacgttggaccctttcttttgttctcctttcaagtacactatcttcttttgacaactttgctcgagtgagtgataatttgatcgactcttttggtagtgtattttggtggcgttagcttttacttcatgctaattgcaaaggtgtcgcatgatttgcttgagcagagatatcaccatgacatttcccaagttcgccttccactttcaaatcctaagagtccagctggtcaagcaagcaatgttctgaagggatcgtatggtcggcgtgttactcttcttagcttttcctcttttgtaataataatactttagcacaagtgtacaacaacagggatcatctcttgggtgttcatagatagttaatgtgtggccttaaataccaacctgacatgaccgaaaaatagaagcagcaagtgatgtgaccatggctatcattgatacaaccgttgctcacatcaagatcaagttgcccaagtgttggaatccaattcggccacctactacagtgttaacttcaaacggacgctacatgtgcatacgagctccgttttgggtccatgagtacttggtggaaagctcttggagtcctctttccaacgattccagactcattgctcaattccatctcatagtccatgtgtaatgacttcagaaggaaattaacaaccttaagcaaagactattgtgtccattctcaactgattgacactgttgaattttactattcagatttccagtactaacaattgttgacttggtaacacgaagatgatactactgaattcgaaaaaaaaaacttttacagcatgagaaaatagtaacttgattttacgatgtctttcttagtttcttgtagtcaagaggttcatatatcctatttgagtatacacaaagacactccaatttgtattgttgtccacattttaagcatgtcattttattacttgaaaattatttttaactaattcttcagttctatagattctatagtttgtcaatgagttgagcttaaataattataccatttttgcagtttctttccagatgtatgatatcaagaatcaaggttttattgaaagagaagcggtacttttcttgactaagttatcacacaacttactagttcatataagaggtagagctctgttagtacttggctacttcaatgttttgaatttttcaaccatcagctcgaacaatcggaagtttgagagtgaattgaactggttttgtcactgactcacattttacttgtgtgtaatcttagctgaagcaaatgatggttgccacgctggcagaataagatctaaaccttacagaccaggttatagaaaccatcattgacaaggtgcggattccatggctatttgtccttaattctgagtttagttcctttgtaatgttagaactaatgcagtttggagacatgacgcttactgaaatctctcatatgaaatgttaactgcaattttttccattgtcgtctgaaaacatttgaggaggtagatacgaagaaagacaggaaaattgattttgaggagtggcaagcacttgtcaatgcccatccgtgtttgctgaagaatatgactctgacctacctccggtagtaagactctcctacgttgaccctttcttttgttatcctttcaagtacactctattcttttcaaaactttgctcgagtgagtgataatttgatagactcttttcgttgtgtattttggtggcgttagcttttacttcatgctaattgcaaagatgttgcatgatttgtttgagtagagatatcaccattgcatttcccgagttcttccactctcaagtgaaggactaatcctgagagtccagctggtcaagcaagtaatgttctgaagggatagtattgtcagcgtattactcttcttagccactttagcacaagtgtacaacaacagagatcatctcttggctgttcatccctcctccctagcacaagtaattaatatagcaatagagcgtaatctaccttttacccacatataaacatccatccgatcatcagttgatcagccactttgtgagatgacagttttataataatcacatcgcgcgattaaagaattattggaacactgtctttttttatacaggcactctctcaactctatctatctatctatccccatttcaccgtcgtgcatgtcaaaatcgaaataccaataggctgagatatttccccaactttctcagctcatctctctccttttccatgcgcacacttttcaaactgctaaacggtgtatttttgtaaatgttttgtatacaaaagttgctttaaaaaataatatttatttatttttgaaaaaaagctaatacttaattaatcctgcgttaatgagtcgttccgttttacgtacgcgaggtattggttcccaatagggatgaaactggttcggatagtttccagccgtccggaccaattttcggattcggaaaaattcggtcggaactatccggaatttctcgaattcagaaacgaattcggattttttttctcggatacaaaaacgaataaagtaagggtgatatccgacggaatcggaaaacggtcggaaactatccgggatttttcatcggatatccgaagatatttttcagcaaaaaaaacaaaaaaaaaaccagaaaccctaaccggctagccggccacgccagctgcccgctgccgccgcccgtcgccgcgcgagcccgcctgctgccgccgccacccgtcgccgcctgccccgcctcgcgagcccgcgcgccgctctcggccggtcgccgcctgccccgccccgcgctgctcttggccggccgccgccgccctgcgcctgtggatgagaggaagtgagagagagagagaggagaggaagagtcaagaggataaggttgggggtgaaaaaaatggtggattttttttcaatgtaaaaatcaatttttattttatacgtggctctttaaaatgaatttaaaggcactaaatcaactcatatgaaaaagttattaaaaacaaagttgtataatgtcacaccctgaagttctttcccaagcctaaattgaagttctaaatggtctcaagaaaataccggtgtaaagcaagagaaaaccctaataaattaatgtaaataataatcggatttggcatgtggaatttttcttgtgttctacatgtcgaaatacgctaacaagatttttagtggaattttcagagctctagaaataattttaaccaattaaaattgagcacaagcaatatttaatcccaggaaaatccatttttcttctttttcctttttcttttctctttttccttcaattgggccgccggcccattccctctttttcccccctttcttcctgctgggccgaccgacaggccgaggcccagccgaaccggccgcctccctcctctccaccggggtcgccgacaggtggggcccacctgtcgggcccgtccccttcctccagccggcgccgccgcgcccacgttcccgcctcctccgggccacgtcggccacgcccgcgcatgcgccgcgtcacccgcactcactccccttccctctcgctcgcgcccgcgcccgagatcccacctctctctcctcccccactcccccacgtcggccggcgattcccgcctctaccggccacgtccgagctccccctcctctatttaagcaccaccgccaccccctctctctttttccccatctcgccgagccctctcgtgccctttaacgccctagcgtcgtcgcccccctcttcgccgccaccgccaccggtccggtcaccgctagccacctctagtcgccgcgccgacgacgccgccgcgatcgccgtcgtgcgggccaccccgtccacccctcctccgttggattccgccgccggaacccactccatgtcgttcgccggtgagcaccgccatggccgccgccttcggccggcgtcctcgccctctcccattttcctctctccctctaacccctctcatcttgttcgctaggtggttccggagctcgtcccgccgtcgccatcgcccttcgtcgctcgccgtcgtcaatcgttgtcggtgaggtccccctcccttcaatctctctctctctcccgcgccgctagttgccgccatgccgctgcctagccgcttagccgcccctgtcgccgcccgcgtcgccgtgacgccgccgccctccgccgccggccggttgccgccggtcgccgcctcgcatcgccgctgcgtgcgagccgcgccgtggcgcgccatggccgccaggccggcttgagccgtgcccgcgcgagccggccgcgagccgcatccgccgtccgatctaccgggcagtagatcggagccatccgttcggccgcccacgtggctgccgcatggccgccgcgtcggcgccacgtccgcgccacgtggtgcgccgcccctttttccggtccgtggacccagtccaccgcggaccgccacccgtgccacttccatgtggggcccacatgtcagcgccgccctctctctccccgagatttatttattgcgcaataaatcaattaaggatttttctgtttatagtaaaaatacagtgaatcttctaaaattcatatctaattcatccgagctccgtttaagcccattcaagtctcagtaaatcaagaaaaatgtgtacaatccattaaaaatggttttgttctctgtttcagtagtcttatagcttgtttgtactgtttgctttgtttgtcgcttagattccggccctcccgacgctccggtgtaccttgaaatagtcaccgaagttcctccagctgcagagcaagacatgtcatgcttgtcacttgaacatgttgatcctatattgcaaatgctccattgttttccttcaaatactgtattgttttataatattaccatgggatgtttacctactgttatagccatgctattttgtaccatgttcctttgttagcttgggatatgacatgactagacattggactagggattgcttagccatgcttagttcaactagcacacaatggggaaaattatattaatgtctagacttcaggttctagtgttgacattggattagagccaccgtcctggtgtcgcttcattaaaatatgttacatggtgggctgtgggtgcatggttttgctagtcgcacccatggcaattaaggaccggttcgcgggaaaccctggaagaattcctcgtacttaccacaagccagcgtgggcaacggctgggcttgtagtgtagctttcctctagctgacgcatccaggcaagggtgggcgtgatggggtttggatgggccctgcgacggcctatgcggcttccggattcacctaggcacgagaggggactgcccactgccttgcgaggagtgggggtgaaacctgaggtgtggtgtgcttggttagagggggttatgcgaagggtcctgtcacgacctctatccggtatgtcgtggtggcatgtcggcgcacggaaacgtgttgtggggctgtcttgtgggtacagttgtacacctctgatcagagtaaaactattcgaatagccgtgcccgcggttatgggcagtcaaccagattcaccgtgattagactcaccctagactagtctaatggaattgaatagtataggtggatggttgggtctgttgcaacgtggtatagcgttggacagtggatgattaatattgattaattattacaactgtttactgcttttaacttctgtttataaatgcccgctttatgcaaatgaaccaatatagctatcccttgataattccctgcatcatacccctattccggtatgacttgctgagtatagtgggtagtactcagtcttgctctatttttccaaaccctagagtttgagtatgcgtcagatggtggtttttccgaggagtaggcttcgtccgtgccgtcgaagatgcctgtggagtggtattcccgctgcggtccaagtcaaggcttagctccagttatcttttaattttccgctgtatttatgtaagactttttataatgtttgtaagacgtggatctgtatgtcaactttgtcgtttgtgtaccccggccggtcctggacgggaattttaatgcacattctgcttggaattctattcgagaatttctgggcgtgacatataacttattgagatctattatttttattttggtcatttctccatccgagtttgattaaactatataaaatttaaacttaaaaatataagaaattcaaataattttttgggtagtaaatgatttcaaatgaaaaaattttcaacaacaaagttgtataacacatcaacatctacaacttttgttttggtcatttttctatatgactttgtttgaaccatttgaatttgaatttcaaaatatgataacttctaacaataatttgaaatactaaatgatttcaactgaaaaagtcatcaacaacaaagttgtataactcatcaagatctataacttttattttggtcatttcttcatccgacaaagtgataataacattgttcacaaaatttgcatctatctcatatgtaaactttgtgaacaatattattatcaatttattagatgaagaaatgactaaaataaaagttgtatgtcttgatgagctctgcaactttcatgttcatgactttttcagctgaaattaattacagcttcaaaatattatttgaagttttgaaattcaaatttttaattgataaaacaaagtcacaagaaaaaatggccaaaataatagcagcaagaacacaataacatgatagagcatgattttagaaacatttaggaaaaagaatcatccaatttggagttcatatgagtgagataaattagtttcaaatttccaaattttatttttgcatacggcttcctaagtcacccgtatggaaaaattgatttttttcatgcgggtccttaaatggtccacatacaaataaatgaaaaaaattcaattctgaaaaataaccactcaaatgtttaaaaactttcaattgaaatgttcaacccaaaatttaaaatattcaaccaattttcaaaaatttcaatgtgcctacgaaaatttcagtgatacacattaatttatttgtttcatgataacataaatttgtatggaaagtaaacataacattttctatctccccttgcccttataaatagagataaaatttgaaaatactgatgttttgtttttgaaaactaatggctacatctcttcctcgttttaagaagcttattttgaggggtctcgatattttgataattattcgttaccgtattcgtttcgattcgtattcgctccgtatctgtattcgataatattcgattccgttttcgtatccgggtttccgattccgatttcgattccgagaaaaaatatgaaaacgaatatgatagagctagtttccgaccttattcgatccgttttcatccctagttcccaacatgaaagaacgaacactaaacccatgatggattatcactacttttacacttggtcccaaaagagaaaaggtgccattaaccatttaaccttgccattccagtacagaaaccaacctgaaaaggatgatggactagtacttgcaattcattctcaagtttgttgtgggagagcaagattcaagaatcacaagaaattacgtatgatctctccgaaaaaaatttgttttgaagtttcctaaacttggaaataggtagtcaaaaaattgatctctctaaaagaaaacctaaattttattcctaaaactaaaagtgggcatttatgttaaactaacaacaaattttcctgttttccttcatgtcgtgcacgctgctggtgctcccccgcagagtgtggcgctcccgtgagaaaaatctcgcgcgaataagagaatggggacggcatatgcgcctaaaataaagagagcacaggatgcggggaaggggcttccaaaaaattagcatccgggtaggagatctgttggagccatttttttcaccaaaatcccaaaaaaaaagattgggaatgaaataaggggactgttggtgatgagcgaggattttgtaactaagtttaggactaatgttgcaagctgatttttttatgtaacttaaaaacacgaaattgtgggattgatgaaagtagtataggacatattagtacgagttatttacaatcatcatcacgtgatagcttagctaggaacattatacagacacgaacttgcaacacaatcgatatcggcgcgtacttcggcccacacacgtatacgtagtttgttgatgggaaaaagtgcatcgaagatccctcatcttgttattggattacaaaatcatcccccaaccacaaaaccagatatatgtcatccctcatcttacaaaaccgggccactttaggtccttaggcggttttagcctcggttttatcctacgtggtagctgagtcagcgtaggacacatgtgggccccacacgtcagggtgaccacgtcatcataatctctcccctcctctccctttctcctatctctctttctctggcacgatgacgacgtgggaaaaggggtgatgcggcggcggtggcggaggcggggccaagcgccgcgggtgggcgtcataatctccatcctcttctctcccttcctcctctctctctctctttctctggcgcagcaacgagccaggcgcatgggcgtcataatctccatcctcttctctcccttcctcctctctctctctcactttctctggcgcggcaacgagccaggcgcaggcgggcaccgcagtggtgggcgtggaggcaaaggcgggccaggcgccatggcggtggacacaaaggtggaggcaggtgtcggggcggttggcatggaggcattgatgaaaaaaattattggatagttagatatttttatgctttgaaatgaatgtaaaagttaactttttaagattatgtagcatgacacaagtaaatcagttagttaataaaattattatcgacgaagccatgaattttccctccgttttcagtttgctttattttctctacaattttcaagattttctaacattttttaaatttcaattatcctgcaaaatggatatgtggacagaaatatagaccatttccctttgtaaggctgtagaagttcccgtgcgtccaagaaaaaaaaacacgggaagattcctctgcacagttggccccacagccagctaggcgcgcagctaggcacgtgaaaacggagttaacgggaggtctctagtgaacagtacgttaccgggtgcgccaaatgaaacacggtatatttatgtgttaccgtgtgtgccactgcagcgcacgatatgatcctatgttaccgtgtgtcagaacgaacacccggtatcatttgggacgttaccgagtgtgatcacatacgcacggtaacattagttagcacacgggagcttcccgtctccagtagtgagtagagcccgatactaggacaaaaacatatggattttcacttctctgtctctactattataaaaattctattattataaaaattgaagatatttttgttagaattttgatacgtcatccgtttttgagttggttttaatctttatatatctattttaggaaatgaaatctgcttccaatgagatttttggttcgtcctgcatctttcgctactgatcgataggcctgagcgcgcccgacaagagttggaatcacgctcatacacagaatctatactctatataatgtggtaaattgtgcctgtttagcctacgcgaacgcgatcacaatcatgatcaagagatctcctacaatcacgaagggttaacgacttcgtgcgactaacaccggcgtacgtagcaccgatgatcgatctagcgatgccaatcatgcatcaagtagcagcaggcaagcagcgttgtgcgtgaaattatgtggcttctctacagcatcagcatggcgaccaagaaccactgctccaacctttgtatctctactattataaaaactagaggatgccccacgcgttactgcgagacttggttaacatcaatttgttagataggaggtacaatctcaagaaaaaacagaagagacaaatagctttcttggaaaaaaattttttagcagccctatccaaaactttccactagagattgaaataacttttgcatgaagaatgaaaactttatattaaataaattcactatcttaataaatgcaaatttatacatgaattagaaaacattctactcaaaactttctacgaaaatcataaacttattaccctgaaactttctacatgaaaacgttgaaataacatcactatctaactaatataaatttatatgtgaattatagaactttcgtactcaaaacttctatgggaataagaaacttactactctgaaatttccacaggaactttatgttgaaataacatcactatctaagtaattactccaaaactttctacatgattaaaaaactttatgattagaaactttacacaaacgttacgtacaaactttcttctgatacaacaaaaacaaaagtttctactaggaaccacacctatactttctatactttagaaaaactcctctttccaattttgaaaaagaaaactttctattataaaatttggaagacatgctcattgttgctccttggggaaatatcttgaccatttttatggaacttcaaaaaaaaacattgcttctctgtgcaacaataaataagagaccaaataaattatttatttcttaaaaaaataagtaattatttattacttatagaaaaataagtaagaggaaagattcacaagagcaagaaacaccaagatggctgatgagcgaacgattgcccaaagcgaacacccctgttgccctacgtcagagggacgtcctaccacgttgctttgttcgatcggcatcggacaggagcgatcgaacacagggacgaacaagctagctgtcgcagcccacgcaagaaaaatcggcccacgaagaggctcgaccgctgtctccactctgacacatccggagcgcccgccggcgaggatggacatgctagagcggcgcctaccgccggcaaaaatcagcccggtcgattccattcgggaacatacgtctaaaagaagcgtgtgaatactctcgttcttgcttttgctgcagaagccacgagcttgccgttaaacaaaaatcattcatgaccaaactaattaaaaaggaacactagcattgtcaactggttatggatgcttttcaccgtcgatttgctcattaacacagtaataccctaaaaaagagatgcacagatacatatacgagtcctttccttgcttggaactggagatgacaacattgccgccgccgacggcgccggcggcgggagtgccacggagggagcgccttcgtgagccttgccatggagcacacctgcatctccagcgccgcaatataatccgaggcctccgccagcagcgtcgagaacacaagctttcagaaacttcgccttggtcaccaccacgagaaaattgacattgtgccattctcaaaagtgggtttcgtccaaataccacgctgggagtgggctttattaaaatgtcactttcaatcgaagactacacgctataatgcccgaacagacaaaaatacccctgttactaccttcttccacctctgacaagggatgcctcgccggctcgcctctgccacgcccacctcatccgcctccacctccgctccccttcctccccgacaacccccgcctcgtccgcctccacctccgcaccccttcctccccacctcgaccgaccccaaccgacgaccccgtggtcacactccacgccatctgcgccaccaacgccgacgtcggcggtctccgtctttcgtgccaacccgccgtcctagccactcccgttcttccaggcggcggaggcgcacccgcacggcggagtcgttggtgggcatggccatggcgaaggcgcggcgcagtggtcatcggaggtgcaggcgacggcggcggtggccgggacgggtgcgggggctcgcggagggcggggctgggatgggggcggatgggagggggcacggggaggggagccatgggaggggtccccgcaggggcctgtggcctgtggttctccatggaggagagctcgcgcgaaggcagatggtggccgccggcgagagctgatggtgatggagggaggaagaagatgagaggagggtaatttggtccgagatagtattttaacgtgtaaccatgtgttgaaagtggcattttaacgaagcccactcctagcatggcatttgagcgaaacccactttttaaggatggcacaatgtcaattttctcggtcacgacacatgcggccgtgcgcgcgagctctgccggggagcgcagggaagatccggacaaagccaaggccacttcaacccgggactcctgcgacctcctgacaccggagcttgactggcagcgcttgccttctcttccccttccaacggagctccggctgtgtcgagagtggagacgggcggacggcagtcaagcctcttcgtgggccgatttttcttgcgtgggccgcgacagcttagcttgttcgtccctgtgttcgatcgctcccgtccgatgccgattgaacgaatcagcgtggtcagacgtccctctaacgtagaaggacatgactacacagctagtgcagctaccactccatatatgatatagctaccactccatatatgatagatactatccacctatacttcaaatacaattttctctaaaactgctcatccgatatacgatccgattacaccgttgtgttcgtaacagttaaatctttataacaagatctcacatgattatattttgataaaaaaatataaattacttttataatatatctaaattacttttagatttcactaagttacttcttagacatataaaagtaattcaataaaacctaaaagtaatttgcatatactatagaagtaatttataacaaaaagaaagtaacttctataatatatgttaattactttaaaactttattgaatttacttttatatgtttaagaagtaacttagtgaaatataaaagtaatttagatatattataaaagtaatttgtgattttttatcaaaatataatcatgtgagatcttgttgtaaagatttaattgttacgaacacaacggtgtaatcggatcgtagatcagatgagtagtttaagagaaaattatatttgaagtatagatggtaggaatattttttctacttgatcaattagtactatagtaaagaacgattcttcaagacacatatctggacaatggctgatcgtatctggacaatggctagcgtcgcttgttatgtctaaatcaagagcactctcgatttagattttgcggacgtagaagccattacgtctatcagaacggatccgattccattctgactgggacacagattcagattcaaatgtttatatatagaatgtttttttacatcagtataaagtttataagtgtatagtttatatgtataaagtttgcgtttaaaatatatttgtgaatggtaagttctaaaattatgtagatggacttatgtgaattgaaagaccaaaatcgaactaaaaaatagtttccaattagagacttttttccataaagtttgataaatacttgtataaatctggtgtacatgtggtctggccgttcgctgcgcgtgcgcggtcatgcgtcagaccttcccatagaaatgaaatggcattcaacaaacaaagaaaaaagatacgcatatggtagtaacatgaaattgctaatgcaacatttctgatcaaaaccaattattaagcaaaacctaaaacacaaacttcggatgcataattttgtagcaagagcaggaggggcacatcaagtcaatgtagaaagtttctacagcattaccatgtacttcagggtaatcctgcttggttagagtggtgtatggtatgtaagcactttttcaggaaatattcaatatatcttatcatctatttttagttgcattgtactgatagtagtagtgacgttctataatagttatcatgtcagtaagtgatccagctttgaaacttacggatgaattaacttatccacaatcatttattttccaagcattctatcagcacctaccccaatcagaacctatttcaagcagtatcatgtcataaacaaatgaaatgaactgacaaaaaaaggcatggaatgaatttagttacagctaacctctgtttattgacgtgatgtcaacaaatatatgtgtgctcctaagaacagaacgggggacaactaaaagcactcataaatttgaaaaatacacagttaactgtaaggttcaccaaatcgctgggttcatcaagcttgctgcgggataaagctcgatgtggcaggaaatacatgcgaccaagatgacgaatcaaacaaaaatcacaaccgaatgcgcaactaatgtaataatccaggagaggaaaaccaaatcatggtagcaagttcaccgtaggagggagctagacgttgaggaaaataccggcgacaaaggaacacgatgatgagccgttgccgcaaaacccctagacctgtccgtctaacttcaccatcctcgccttccgccttcacgtctccgagaggatggtcaacgacggcgatggagggtcgtcgacgctcccgaagacctcaccatctatcccccctccgctggagtgataggaagagagggcaacgagaaagggagaaggggaataaggggaatcggacctgttaaccactagaggaaagaacagattgcgaaagagcgcgacgcgagcgttcggtagttggagatttcggcttcggaatcgggcggctactggactccctctttggctgctgcttcaattccgcggccgtattataactgctgcaccggatcctctggccggcagaaacctcccataaatccgtcctccgatccgttccgccggtgataatttgtctagtcgactcaagctagccataaaattcttcatcttccgagagtaattccaccgaccaattcaagtctgagattgattaattggtgtgcgagcgagatggcggcggcggcggcgatagcgcagtggctgtctgatatggccgggttggtgatgaggtgctgtaaccctatccctagctacaccaacgaggacggccccaaaaacccggaagctcttaccacccaaaccatatgtaagcatccacgttaatttttatttttttaattagatcttgtcccatcgaggtgcgtttatacttaggccctatttgattcagcttaggatccttataatctggattattaggaataagctaaaataaacagatagcttattagggcgtttacaacacaccgaggtggcgttcagcctcgcacccaagaaccgaatattcggtgccacatcggcaattcgcgtggaatcctcaagaacgtggagcaagttttggctacgagttcctcgtcttagccggtaggacccacacgtgccagaggagaaagggagagaagagcgaggaggggagggcggggccgaccaggagaaaggagcggcggctccggccgcgccgccccccgatcggcgccggccagggctcgccagctgcgccacccctcgatctgcgccggctggggctcgccgacgcgccgccgctccgcccggctccacgcgaggacgaccgcgccgccgctctggcgctccgctcggctccgtgcgaggacgagctcaccgccgccccggcgctccgctcgctcgctgcttgggccgcccagccgtcgctccggtcgccgccttgctgattccgtcggtggggaggagttcatggttcagtgactttctttggtgggaacgaagactagaggacagagagagggtagatgaaaagtaaaagggaataaagattggtgggccccacttaaaaaaaatgcactgtggagtattgttcttgggcgttctcctgcataggtggcatgcgaggctcctcaaattttgacgacgctgcataggtggcatgcgaggctcctcaaattttgacgacgcactgctactgcccttacgatagaatattataatctataagtcagattactataatcagtaatccactttaaaggtgcttttttagattattgggtagctaacaactaacaaacagcttataatctaggaaaacaaacagctcgcagcttattatatgtcggcttattataattcagtttataggattctagttcaataatctagattataataattttaaactgaaacaaacagggccttattaaataagtagattagatacaaacatgttgtactagattactagaattattgttttttcttttcttctttctttttagttaccgtcaacgagattgaagccttatatgagcttttcaaaaggattgatggtgccatcatcgaatatggcaagatcaacaaggtacgcgcgcgtgtgtatcatgtttaactagattacaaatgcatgttgattagtagaattattaattatttggtttacacatatcttgaagcatgcatgcatatgcatttgttcgccctcgatggtacacatcaaacggaaattaaatacacatgaatgaataatgtctatgtctactcgctgcatgcgatggctcactaatctcaatcgattacgaagcctcggccgttcaatgattatttcttaatgttaccaatgaatagttagtatttgatttcttgccaaaccaattagagaaaattccttatatgccactcaaaattactcatttcccttatatattattgaaaatgctacgtttccttttatgccactgagttttagttttcatccctttgatgccaccaccgtcaagtcagttgaccctagctcccgttaagtgagttaacatgttagatttttcttcctatacctgtattaccctcactcttcaatccatgctatcactaattaatgatctgaaatgtgcctagcactctcttcatccttggtcacccagcgaatcaagatgattagttaaatgactgcaagctaaaatcaagaataattaaatgtgtgccgatagttaattcatgttctagtatatatgtgcccttgatgcaaattaaatgtgtgccaatggttacatcaaatgactgcaagcttgcaatcaaggataattaaatgtgtgcctacggttaattacggaagcttgtttagcagagcttgtggaggtggttcaccgatattagcaacttctctggtatgcatggagaggagcaaacgcgatgtcacacagtagtggaagtgtgggactacaggagctagctcagttagtcagtgtctcggtgatggaatatgcacaatggtgaaaaaaacataaacgagagggagaggaacctgagaaaaaaaaacagagggaacaagggcactagtgtcttttcatggcctacttaacaccaacttaacagtagtctaatggtagtggcactaaagggataaaaattgaaacccaacggcatagaaggaaatgtaactttttcagtaggatataaggaagctaggtaattttgactgacatataagagattctctgtcacgcccggaaattcactagtaatttccgaacttatttgtgcatgaaatcctcgtctaggaatcagccgaggtacacaaattgacaatttaatatacagatttatcaaattaactaaaacgataaatacttacttaagaggcacttagtcctcaccacgaagaaaaactgcagcggaaaataaaatctagcgaagctccggctccactcccacaggcagctcaactggggtataagccaaacgtcttctccttctggattctttttcttcaactgaggttgattgattattgcaaggtgagcatatgacatactcagcaagccacacagcaaatatgcaagtgcacaaggataccaaaggatggcataatataggctcatttgcaaaagcagcatttagcaaaacatttaagagaagtaaaacagtggagtaattaatcagaaattttaatcaacactgaacagcacacccatgctgcacaggcccaaccatcctgaacaaccatacacggctgtacagatctaactccaaaccaggagctaagcaaattattaccaggtataacatccataattattgtgagaggtgtgagactaatcacgaaaaacattgctcaacccgcccataaccgcgggcacggctattcgaatagttttactctggccagaggtgtaccactgtacccacaagacacagccccacaccatgtcaccatgtgcctcagtaccaccacggtacctcggtaaggagctgtgacattacccctcgcacaacacaatccaccacagtgcaccattcctggatcataatcaccccctcaaaaaccagaggcatggactccccagcgacccccgtgggcttatctccgccacttctcagtctggtgctccgcaatgaactatgttatacaaaaggtaaagccgttgcccatgctggcttgtggttggcacggttaatgtttcacaacagtagctcgcgaaccggtccttaattgccatgagcacgactctcaaaaccatgtgctcacaacccacctttatcatattttagttggcaagtaattatttaaccaatcacgattgaccatcgtgaactatcattaagccaccattaaataatagtgagtcataagttatcccaatagtgtgctaatgtttctaagcatggctaagcaattatatctaatatttagctgaaccaatatataaagctcaactagtcaagttataataacccaaggtatcaaggaataaagtaatcaatgcaaattggccataacaaaggaataagttcacaccacccggtgacattctaaaataaatgcacagttgaaataaatagagaattttaaatataggatcaacatgctcaaaggattgtgtttaggatctgtgtgacttgccttgcaataatcggtcttcaattaatcttcttgaatacttccggcgcactcgcgaaccttcgcaacgacgaaaacgacaagctaacacgtaaaacgaagaaaaacactaatgaaaaccaaataaacagtacataaaaagtaaacagtacatgaattatgagacttgaacggcctcattctgacttcgtatgaatttattatgaattttacaagattaaatctaattaaagcccatttaaaaagaattaaataaatttaattcaatttatggacaattttattatgtagatctttattttatacaatttttgcaacttgaaccacattaaactgagttacaaagaattagttatgaatttttaaagattaaatcggattaacacacttatatagattttaattgaattatgacgtaataatgaattatttttgaaaaggaaaagagaattattgcgtcagcgggtcgggtttacggtggacccggtgcacggcagcggttcacgggaacggacggccgagatcgatcctatccacaacgaacggccgagatcgatcggatccaccgcggctcacggacggacgacgacgatgacgtcagcggtgacgtcaccaccggcggcggctcggaagcgcaagctcgccggcgaacgacggcgcgacgacgcaaacggaggacaccaacgggtagagggcgacgcggcgaactcaccggtgaccaaagaagcggcggaggagcaacggatggcgccggcgacgaggaagaagcggcggcgaagatcgggtcgacggcagcgacggtgctccagcggtcttcggcgacggcgaaggggtggacggggacggcggcgacttggcgaccacgatgacgacctccccgagcgacgacgacgaccggaacggcggcggcgcacggctggagcggcggcgacgacggcggcgctaggtcacacggcgctagggcgcttccgacggcgagagacgaagacgagggaggcggcgggtagaggagagctcgggggtccttttaaaggggttggaaggcggcggcaaaggcccacggcgaccggcggcgggatggaaagctcggggttcggaggaaagaaaccgatccgattcgacctcgaattcacgaacttccaaagcgattgagacgatgattccaaaagagaaaaggaagaggagatcgagaagatcatttcccctctaaagatttcaccggatcaggaaaggatcgatcggatttggaaggagacggcggcggctcggacgcggctcggctagggtttcgggcggcggcggcggcgcgaggaagacgaacctgacaggtggggcccacctgtcagcgacagcgagagagagaggagagcggcggctcggactgggccgactgggccggggagagagagagggtttttgggccgactttcggcccaaagccaaaagaagacttttaaaaacctttttcaatttaaattattcatgaaatgcaattccatttattaaaaatacttccttagctcaaataaatcccagaaaaatctaggaattatagaattaagcaaagtatttaacaaaattttatctagcccaattttatattgagatttagcaaattaaaattagatcttctcttttaagcttttaagatcatttctaataattccttttaaacaacaatttatagtttaaggatttttaaacaagaaaagctcttaacaaatataattagatcattattgatcaaataattactgaactattctttgtatcatttaggaattgagctctgaaaaatccgagaaaatctcagagagttgacttaatcatggagaatttaataaaaattaaatccatccgtgctttatatttagaaaattttatttcccacatttaacttcacttgtaaattaaagaacatttaagataaattttattattaatttattaaataatttataaatcctgaaacgaaaatcaggatgtgacagatctaccccccttataaagaatctcgtcccgagattcggaacggctagaaagaaaagggcataggtaaactgcagtctatcttattccataactccgataattattctaaggctttaaagaaaactactgccgctttgaaactggtggctgagctgtaacacttgaagacgcaactcttgaagacgcaactggcactgcatttgctcctgtgacgacaacgttgttgacttgaccttgcgactgcggatgcttcggcttcggacactctcttgcaaagtggcctggcttgtaacagttgaaacatacctgctgctcccttccactactgttattctcctgagactgatcctgctgaactggcaccgactgattagcttgctcgatgttaacttcattgctttcattagtctctgatttgatctcaccaccgatgttcaactgttgcgattgtccttgaccagcggaagaagattcaccaatttggagtggcttgatacgctgcctctggctactaccttgtgcctcctggaatacaatcattttccttttacggttatccatcctgttcttcttgtcttcaagtcgaattgctttgtcaactagctgctgaaaatcaacatagtcatgagagatcaacgtaactgacagttcatccttcagaccttccaagaacttctcctgcctttcctcgtcagtacgcacatcttctggagcataacgtgccagacgattgaactcatgaagatactctgccacggtacgatccttttgcttcaaagccctaaactcacgcttctttaaagcaacaactcctacaggtatgtgtgtcttcttgaatccttcggtaaactcttcccaagtgattggttgtccttctgctctgttcatccggaaatgatcccaccattctgaagcaggtccttgcaactgatgtgaagcgaacatgactttctcctgatctgtacactggagcaattccaacttcttctcaacagcgtgcagccaatcacctgcttccactgggttggtagtgctagaaaaggtaggtggcctcacacgaagaaaatcagttaacttgttctgcggcggtggagcattgttgttcccttggttgagctggttctgcatctgctgtatcatcatgttcattaactgaatctgttgagccagaacttgagcaagagttgggttcccttcattgttatcgtttccacttccactggcacgagtgttcaccatctgttgcttattagagaagatgggaggagaggggttacactaaagacaagaccttaaccaggttaacactgatctgatgtgtgtagaccattatattgttcaagttgattaagcaagcaacctagtatagttacacgctcatcaatgaactactccaatgatgggaatgcaaccatacctacacacaagcaagcaacaaacgttctatcctactaactattcctcaaagacactttggcggcataggttctaaggtaggatccaaacttcattccatcttgaccacttggcacttcggtccttccttgatccacttgactgatctccataagtagacctcattagcgtcttcaagtttcaatgtcttagaactactcaagttgaaagcaggaggggagaggatgataaaatgatttatagagaattctagagaaggaagaaaggaaaattttcacaaatcatgttttcggaaaatttgtccttaaggtttgaccatttggcttatcctacagtcgagatggctctgataccaacttgtcacgcccggaaattcactagtaatttccgaacttatttgtgcatgaaatcctcgtccaggaatcatccgaggtacacaaattgacaatttaatatacagattcatcaaattaactaaaacgataaatacttacttaagaggcacttagtcctcaccatgaagaaaactgcagcggaaaataaaatctagcgaagctccggctccactcccacaggcagctcaactggggtataagccaaacgtcttctccttctggattctttttcttcaactgaggttgattgattattgcaaggtgagcatatgacatactcagcaagccacacagcaaatatgcaagtgcacaaggataccaaaggctggcataatataggctcatttgcaaaagcagcatttagcaaaacatttaagagaagtaaaacagtggagtaattaatcagaaattttaatcaacactgaacagcacacccatgctgcacaggcccaaccatcctgaacaaccatacccggctgtacagatctaactccaaaccaggagctaagcaaattattaccaggtataacatccataattattgtgagaggtgtgagactaatcacgaaaaacattgctcaacccgcccataaccgcgggcacggctattcgaatagttttactctggccagaggtgtaccactgtacccacaagacacagccccacatcatgtcaccatgtgcctcagtaccaccacggtacctcggtaaggagctgtgacattacccctcgcacaacacaatccaccacagtgcaccattcctggatcataatcaccccctcaaaaaccagaggcatggactccccaacgacccccgtgggcttatctccgccacttctcagtctggtgctccgcaatgaactatgttatacaaaaggtaaagccgttgcccatgctggcttgtggttggcacggttaatgtttcacaacagtagctcacgaaccggtccttaattaccatgagcacgactctcaaaaccatgtgctcacaacccacctttatcatattttagttggcaagtaattatttaaccaatcacgattgaccatcgtgaactatcattaagccaccattaaataatagtgagtcataagttatcccaatagtgtgctaatgtttctaagcatggctaagcaattatatctaatatctagctgaaccaatatataaagctcaactagtcaagttataataacccaaggtatcaaggaataaagtaatcaatgcaaattggccataacaaaggaataagttcacaccactcggtgacattctaaaataaatgcacagttaaaataaatagagaattttaaatataggatcaacatgctcaaaggattgtgtttaggatctgtgtgacttgccttgcaataatcggtcttcaattaatcttcttgaatacttccggcgcactcgcgaaccttcgcaacgacgaaaacgacaagttaacacgcaaaacgaagaaaaacactaataaaaaccaaataaacagtataaaaagtaaacagtacatgaattatgagacttgaacggcctcattctgacttcatatgaatttattatgaattttacaagattaaatctaattaaagcccatttaaaaagaattaaataaatttaattcaatttatggacaattttattatgtagatctttattttatacaatttttgcaacttgaaccacattaaacttagttacaaagaattagttatgaatttttaaagattaaatcggattaaaacacttatatagattttaattgaattatgacgcaataatgaattatttttgaaaaggaaaagagaattattgcgtcagcgggtcgggtttacggtggaccgggtgcatggcagcggttcacgggaacggacggccgagatcgatcctatccacaacgaacggccgagatcgatcggatccaccgcggctcacggacggacgacgacgatgacgtcagcggtgacgtcaccaccggcggcggctcgggagcgcaagctcgccggcgaacgacggcgcgacgacgcaaacggaggacaccaacgggtagagggcgacgcggcgaactcaccggtgaccaaagaagcggcggaggagcaacggatggcgccggcgacgaggaagaaacggcggcgaagatcgggtcgacggcggcgacggtgctccggcggtcttcggcgacggcgaaggggtggacggggacagcggcgacttggcgaccacgatgacgacctccccgagcgacgacgacgaccggaacggcggcggcgcacggctggagcggcggcgacgacggcggcgctaggtcacacggcgctagggcgcttccgacggcgagagacgaagacgagggaggcggcgggtagaggagagctcgggggtccttttaaaggggttggaaggcggcggcaaaggcccacggcgatcggcggcgggatggaaagctcggggttcggaggaaagaaaccgatccgattcgacctcgaatccacgaacttccaaagcgattgagacgatgattccaaaagagaaaaggaagaggagatcgagaagatcatttcgcctttaaagatttcaccggatcgggaaaggatcgatcggatttggaaggagacggcggcggctcggacgcggctcggctagggtttcgggcggcggcggcggcgcgaggaagacgaacctgacaggtggggcccacctgtcagcgacagcgagagagagaggagagcggcggctcggactaggccgactgggccggggagagagagagggtttttgggccgactttcggcccaaagccaaaagaagacttttaaaaacctttttcaatttaaattatttatgaaatgcaattccatttattaaaaatacttccttagctcaaataaatcccagagaaatctaggaattatagaattaagcaaagtatttaacaaaattttatctagcccaattttatattgagatttagcaaattaaaattagatcttctcttttaagcttttaagatcatttctaataattccttttaaacaacaatttataatttaaggatttttaaacaagaaaagctcttaacaaatataattagatcattattgatcaaataattactgaactattctttgtattatttaggaattgagctctgaaaaatccaagaaaatctcagagagttgacttaatcatggagaatttaataaaaattaaatccatccatgctttatatttagaaaattttatttcccacatttaacttcacttgtaaattaaagaacatttaagataaattttattattaatttattaaataatttataaatcctgaaacgaaaatcaggatgtgacattctctcaactaattatataggtccaaaattgaagctgcctaatattttcttcatctatagttttgaagaaacaccaaacatgtgtcttgcattttcttcgtcatatcggtatttaattgcatcactgtctaactaatagtgttttaatttgatttgcaggaagagttcaacttgagagtatttggtcctgaaaagggaggcaccatgtttactgatcaggtacgtatacacttgtatgctttgatgagctttttctttcttccttaattcacctagaataaactggaggatttttgtactttggtcctcgtgtaaataaataagctctttagtatgccacatgtgtcataatctaaaatgttctaaagtgtagatatctcatactccctccgtttcatattataagacattctgcccacattcatataaatattaatgaatctagacatatatgtgtatatattcattaatatctatatgaatgtggtcaatgctagaatatcttataatatgaaacggatgaagtagtatttatttacaggtaggacttaggacacgtaggaatcagtactagtatttcaaaggagatggttgaagaagattgagaagatttataaaatgaggtgaaccattagcatatgattaattaaatgttaattattgtaaacttaaaaaatgattaatgtgactttttaaaacaactttcggattttttttaacaaaaatgcaccgtttaccgtttagaggtctttctcttcaatcggctaaaacgaacacagatgatgttatcaatatgtatgtatggacaaaggagtggattggctgtttttctaactttgatatttttgccattttgctttgtaggtatttgatttatttgatttgaagcttgaacaagctctcggatttgaagagtttgcagtagctttatccatcttccatcctgacactcccatggaggacaagatcgattgtaagttgataccagttccatagtccatgtctagtgactttagaaggaaatgaacaaccttaagcaaagactattgtgtccattctcaactgattgacactgttgaatttgactacttagactttcagtgctaacaattgttgacttggtaacacgaatatgatactactgaattccaaaagaaaaacttttacagcatgagaaaatagtaacttgattttacgatgtcattcttagtttcttgtagtcaagaggttcatgtttcctatttgagtatttacatagacactccaatttgtattgttgtccaatttgtcattttattacttgatgctatagtttgtcaatgagtcaagcttaaataattataccattttgcagtttctttccagttgtacgatatcaagaatcaaggttttattgaaagagcagaggtacttttcttgaccaagttatcacacaccatatgttactacttactagctcatagaagagctagagctctgttagtacttggccactttaatgttttgaaagtttgagagtggattgaactagttttgtcactaatcagacattttacttgtgtgtaatcttagctaaagcaaatgatggttgccacactggctgaatcagatctgaaccttacagaccaggtcatagaaaccatcattgacaagatgcagatttcatggctctttatccttaattctgagtttagttactttgggatgttagaactgatgcagttttgagacatgacacttactgaattatctcaaatgaaatgttaactgcaaatttttttttccactgtcatctgaagacatttgaggaggcagatacgaacaaagatgggaaaattgatttcgaggagtggcaagcacttgtcaacgcccatccatgtttactgaagaacatgactctggcctacctcgggtagtaagactctcctacgttgatcctttcttttgttttcctttctagtacactatgttcttttgaaaactttgctcgagtgaatgataatttgatcgactcttttggttgtgtattttgatggtgttagctttacttcatgctaattgcaaagatgttgcatgatttgtttgagcagagatatcaccatgacatttcctgagtttgtcttccactctcaagtgaaggactaatcctgacagtccagctggtcaagtaagcaatgctccgaagggatcgtattgtcgtcgtgttactcttcttagcctttactcttttgtaatgatacttcagcacaagtgtacaacaacagggatcatctcttggatgttcatccctctcctccctagcttagttttagctagataagttaatttgtggccttaccaacctgacatgatcgaaaaatagaagcagcaagtggcagcagttgtacattcccatcagataaccagatatttatgtggtcatgtataaccatgctcatgttaatgtttaataagcaaataaattcactaacacctagatagtacatccatacaagtcagagaccgtacgtgtaatttatgctagcttcaaaattgagcatgccgatctgatagctcggcagcaggtggatgtatcaaagtatgacaacttaagtatgtcgatgcaacaacatggatatgcaaaagtgctttcttggtcaaagaagaggaaggtgccattatgcgtgattttttttaagaaacacatcatcagggcacacattgataaaggaaccacctcagccgcttggaacttccatgcaattttgttgcaaaattacgtgaatttgatattctttcctctttttctgaaagacggaagtaggaattaatgtgggccatttatttgcaagagttacacatttactatttaacacagacatacatggaaggaaagatttaaaaaaatactaaaagtttcaaaacacttacgtttatgaaaaggaaaatgagcatttggaacgagtccagagaatgcaaggattattttgggtgggcacaagaatttaagggcttattcggatcataggattgtaaaaacgtaggaatagaaaaatcataggaatatgatagaaatgcatgtgtaaaacagaggattgaaaaacacaggatttctgtagataggattggtaaatgtgttcggatagacagaggaaaaacaaaggaaacggaaaaaatgaggtaggagtggatgttcgagactcctaatgggcgatcaatcgctgggcgacaggagcagcgatcgatttccctttccgccacttgccgccaccacttgccttttctggtttttcttagcctcttttctattgggcttggcccacgagagcccatccacagcacgcgatatctctaatgtgcgatcagtcgctggaatctcggcgcgtcaaccagctttcattcgttttttttttttttttgccaggctcgtgcacttgctctcgtcttttccactgcttttttttttgtttcctcacgtggttttcgttttggcaccgtattactttcctattttattaaattttttcacctaaagtttgtacatattaaatttacacatctaaagtttacacatctaaagtttatacacctagagtttatagatccaaagtttataagttaaaagtttatatactcgattcaaatttgaatttaaatttaaatattttttatatatagtacacgtaaagtttacacatctaaagcttacacatctaaagtttataagtcaaaagtttacatatccgattcaaatttgaattatgtataaactttagatgtatagaaatactatatatataaaatatttgaattcaaactcaaattcaaatttgaatcggatataattcaaattcaaatttgaaacgagtatataaacttttgacttataaactttaggtctataaactttaggtgtatagaaatactatatatagaaaatattttgaattcaaattcaaattcaaattcaaatttgaataagatataattcaaattcaaatttgaaacgggtatataaactttaggtctataaactttaggtgtataaactttagatgtatagaaatactatatataaaaaaatatttgaattcaaatttaaatttgaatcggatatataaaattttgacttataaacttttagtctctaaactttagatgtgtaaacttgaggtgtataaactttaggtgtataaatttattaaaataggaaagtaatgcggtgccaaaaaaaggaaaccaggtggagggagggaggggggagggggtagcgaatctgatcgctacccccattgccagggcgatcgatcgcccattagggctgcccgtggatgttaattttcctttgtttctctattgattgcacaggaaaggaatgtttcctctgattttcctttgaattgattcattgaaccgaacgaaaggaaaggaaatatttcctatctacattattcctctgaaaatcctctaaaaatctctcactccgaagaggccctaaaagggcaggaaaataagagaaagaagatagaatgcaccatctaccttcaatttgcaccaaaccagcaccactcttcctccctaggttttctccagtcattttcctctggcaaaagtagcgccacactgcatgctttgttatgcaaatcaacaatcaggcaaaaaggtaatttgtgatcttaccgcccccgtcaatccatcaccattcgtggttaagcacaccagtatgaaaacttgggctgttggtcacaaaaggtaccagcaaaataacgttgtattgatcgtttgaactgaaacgaatgttccatacgatttcaatcaactgatgcgatttagatatagcctaagtcgcgggcatttggtgagagctgaggatgtaaacttacagcccaatcgttttgacagcagctgattataaaccttcaaagctaatgctagagaaataaactaaaataagaaaacatcaaaatcaactctgaaattaagttctaaaattcaaatttttgccgtggccaataggttaagtttcaaaattcaaattttagttgtggccaattatctgaagaataaacatcagcaccagatttctgaaacgtgtactcataaaaggagtaacgatcaagaagtaacaagtgcccgccacggcaagcgaagccatccgctcacgaaaggtgatgtaaacagaaaatataaaggctatcgttcccatccaaatcttttgccagacaaataaataaaacacgaattttacaaaaagagaacggtcacacacgtttatgaataccgaccatttcaagggtcacaaacgaccagcgattttaatttacaacaccacgtctgtgaaacaaataataataaatcccagttaacctgcttcagacttgagcacaggttgtgcaacaatggcgtgctccggcctggcaacacgcagttggtgttttgagatttgagattatatggccacacttcttttcatcccaacagcggtctggtctggttagcatccctttgacgggtatagctgcaactttcaaacatggcagcggttcaaaattttctacctagaagtttctccctctgtattgttgcatctcctggggaaaaagaagaagaaagaatgttaaacagaaacagggggcattaggtacaaagctttgatgattatacagatacattggcttacaggtgcataataataaacaggacgagtctgccccatcatcatctgctgcccatactgcaacttgaaaaaacatgtataagcccagcgataagtgaaatcaatattttgcattgtttatttgacaactaagaccacagatgcacaccatgcgaactgatcagataaaacttcctcgtaggtcagtagcgtgtaaagaatgaaacaatagttgaaagaagcattaaaaaaggtcaaatttttaaacaatgcaccgcatataatcacaagaggttgaacaagaacttcttaagcatggtaaaaaggggggggggacaagagcagtaatcataacagtacatcggatgaaacattagtgaacacatggcatcagagatataaagaaactgaaattgaaatcatagcaacaagattccttacctgtggcccagcaggatgcatgtaaccttggggcgaaggtccaggctgagcattgtacaccataggctgtccaccataggccggtggaaactgcagtttcattcatataaatgcagtaaggaaaccatatacatacaatttataagtttaaaaacatagcccatgtaatgaaatatgtaaagtggaactggaaccacagccttcttaagagaataagaacattatagtatgtagatgttatcacacaagtacacaacagtataaatgtgccatccattagatccacaaacaaaaaaaagaaacagaaatattagctataaatcatttcagggaactatatgatcacattcagtggaatcagagcatacttcgaagtatctgaaacaattgtttcccttaaacccacaaatcactcatgtaggcttctggaccaaaactcaatgattatacttaaggccacaaaatcttagtcagcaagaacagttcacgcgcttcttaaaattaatgatgagaaatggttgttgcatcaagaaaaggaaatgaatccagtaaggattattgcatcaagaaatgggtggacttggtaaccaaacgaaggccaaattaaatgcttaaatgatgcattctgtcaacaaaccagtgccacaatgccttgagaaaatagaccatatatgcaattacatccataatttaagtattaaaccactatttgaatgtctgaatactgttttcagttcttaaaaagataaaaaaaaagtaagaactcaccattggaggtccaagaggtgctgtaggcatgttattagcatagtagtatggtccatcagatgctggaggttgtggaggcctcacagaagttgatggagtgaaactcttagcattagggttcagcttgaattcctggtttagaaataacagttgtcagtgaccttgcgacacaaatgatcagaggaatagatgcctatcaatatccatgcacaaaagcagccagatgtagtatacgatagaccttagcattcgggttcaaagatgatttttctgagctaagagaacccattgaagagctcggggacaagcctggagcacatgcaactgagcttgcagcaatgcgctcagatgttgatgatgtagaactaccaggtccttgggaggaattcacatattcccccgaagaaggaacttttctagacaaagaagaatctgcaggtagactttctgaggatttctttgcttgaccagatgatgaaggctcagaagcgtgcgagcttgaagatggcacttccaagtctgacaagagtaggacagtaccataacatcagttgaagaacttgtgttaaaaatcatcaagtgtaagcagataacacaactgaaattaataagaacactgattcatctgtaaactaaagatcttaaccataaatcattttacaacactagatagcacctttacataaagcaaacttttactaaattttacaacatagctttgaaaggattagtgttcaaaaaattttacagggctaaattgttcaattcagtgacacctcatttggttcgaacttcaaaggtaactaaataatcatgaaacctctcattcagaaacatagcaatcatccaattccgtaaactagggatggatacctagtgaaggaattattctactaaatcaaagtgttactagctaaacacacatacggataacatttgacttcataacaactgcactgtaaccaagtataagcactcagtttggctttacattcaaactatacatagaactcatagaaggaatacactaccacaaaaggacacaaatcaggataatcaacaaaaaaaatgtctctagctaatgacacatgatcacagtaaatgccataaagacaaattgatgcatagatctataaccaaccttcagaaatcgatgacctgccaccttcagatatctgtagaaaagaaaaaggtttaagttggatgtgaaaaaagatggtgtatgaatcatgttaataagataacacagaaggcagcttacaatattctcagtttgcaaattgcttgtgtccctattaccactgctatctttggtcagtttgtcatccaacctgtggttcacaatagtgtgtcaaaagtctaccaatgatatttccatcaccatcacaatatcatcctattgcaattaacacaaactaaatagagaagctaggaataatgcataatggcctcttttggggggaaacaagtaccaaattttaacctaaacacagaggttcaattgtaagaaactactactgttgtcctaaaatatagctacctctccacttactccctcatctcaaccaaccacaacagtctcatttaatttctccaccttcatctcaaccaatcacaaccatcttatttaatttctccacctacttcctcgttaccaattacaaccattgttcatttaaatttcacatcaaccttaatccctcaaggcctcaaagacagtccaaaggtagctatatccacacacgtggcaggccaggaactgggaaacagaacagcgtgcacaaaaaaaaaatgcttccgaagtgccaattaacatttgctcctagatcatgccaaaacatgcatcctgatggaactacttgaggttgatcatggaactgaggattgtaatggcttgctaaaattatagattaagtagtaagggttatcataaggaataagaaaacttcttcagtttaagatcgcgatgtccaatctctcaataaaaaatgtgctacttagtgctaatcagctagtaattgtgatggatagtttacaaactacactttctagtgagttacttaaaagtttgcgacaataggttttagcagatgggctcaatttgagctctagcctgttgagtccgtgcttttcttttctttttctgtaaccctagatggagtaaagaacagagaaaaagcacaaccacacctggaaaaagattaatgatacaacacaacttccgagtgattcagcattaaaaagtacacaaaactcatatgtccagcgaatagcacgattttatgttagaaccatatcgcagcttgcaatgtataaagcagatgtaacatgcaaatttatgtgtatggattagatagatgaaatttgcagcaaatgtggagagaagtatatatacctgctttcatcaatgggcaaaagtttattcagctgggactgagatactaactggctaacattgttagtgacaggcaaatcagtgccaaataaatgggaagatgattcttcatcctgcgtgccaagaagattagcaaagttttaaacaagatttcatgcttaaaaatattgcatatagtagtaagaaaatatatttgttaatagaaagaaaagctgagatactccctccgtcccaaaaaaaccaaaccaagaattggatgtgacgtaacctagtacaatgaatctggacaagtccagattcattatactaggttatgtcacaaccaatgatttgtgtttttttttggacggagtggtaagtaattctactaaatattgctctcaaaactaatggtataactcatatattggggacgaccaacagctcaagcagcacctatttagagatggagaatagtacagataaggccactccgctctcttaccgcagttgataacaaagccttgggattagtgttgcctgccctggtgagtgaatcaacttgatttgtattgctcaagacatttgtagatgacttaaatttggtattgtctgtatctctgcgcaccgctgaatattttatctcttcatcatggtcaaagtcatcatccaaatataaacccctctcctgcaaatataatctcatatttttatatatactacgaagataactgttgcacatgtgtttctattttaatatttatgcagtcgctaaaactttctacaccctccactagttccacacacgcacacacacacagagagaagcaataaattataagaatgagcacagagtgaaacatttatttactttttagcgagaaggtgtttgtatccgaaaacatgcatatttttactaaactgaaggaccagaaagcccagtgactagaggcttacctcagcaagatgcatatcttttgtatcttctccctctatttctctagctattcttgaagcatgcttttcaagctctctcatgtgaggacctctctctagctttgtggtataaagttcttcattgaaagtactctttaccccaaacaaagctgcatttgtttcaaactggtcccagctcctagcaccatattaattattaatagtcatgctaacatgtataatatatgaacattatccccagaggagctagtactttacaagcaaaaatttccaaggatctaatagagaaatgaatcagcagaaaacttccaacataatttcaatcttagttcacagttccttgcaagttaccagaaagttcaaacatgttctggcagagttcccattcaaacagatgcaagaggattataggacattaacttgacaaaaagtgcttaccattgacaatcatatattgactccccatgtataaccttttaagtagattgacatcacatttagtgttcactatatcaatgttttcaaagtggaaactcaagtctagtcgcctcagtaccgattagggcgactttccgattaatcgcggttagaaccaagtcgccttagtactgactaggacaactaaccacgactaatcaggatttgtcggacaacttgaaaacattattatggcccttgtgaaaccagctacacatagcataagtatgaaacaagtagtcgaagctgatgttattgctaatgatcactaagtcatcaaacaatctctaaatgtgattgattatttcacaaccaccttgatttaaatccaactttcactgatgtgacttgtaaatcttaactttgtagccatacctgttcccctttctgtcatatttttccaattcgatgcactctgaatccccttcatccggtgcccagcgctcaagctccctctcctcaggataatgagagcgagaaatcgcagagtctatcattaagtccttccttttttcttgagaaggaccttttggcagctcatctccaccaagtgctacatcctgaaagttcatgacaaatagtcacaacataagaaagcataaactggacaatggatcatgagaaatcggatagcaatcaaaaggaacatatttgctactcacaaaaaccagtgatcaaacaaactaagtatcaataatggcagttatataaatttttgggtgagaacataaacagaaaagcaagacaacggtgggggataataccttggcaagaatttggacaagctcccttcctggtattatcatagtctcaggcttctttacaacatcagctgcacttttctgtcccctggcagaaccatcctttatcacctgtgccattttcatgataactcctacaaaaacactctcaagagttatgaccaaaaaaaatatcacacttgctccctctaatcagtatagtaccaggatatgccaaaagaaaataaaaggattcaaaagtaatgccagataacatatggaagcgagatttgttacctaagtctttgtcagagtttgttgcatgtaggattccggagataatagagccatttttcacatgcacatccacatgttgtccaataagttgtgtcaaaacatatattagtcgatcccttgaagggcttccatgtcctagtttgcctccattttctaaacacaaatgaaaacgtcatccatgcagcataataacaaatacaaaacaaataaagtaagacatgaggtttacctgcaccactaaaaccaccagatgaagatctcagcaactgtgttttattgtcatgccttccactaccctccctgtcaagcttccgatggggaaatccattggcagaagccctaggaggcatagtttgctgtgggtgattcatagctcctgcatgaaccaccacaaaagtttaaatttacataaggatcaaaagaaattcaagattgagttgaatgcaaaatgaacatgtgtagatagcacgcacaaacattatattggtaactaattacttatcacaaattgatccagcatgcttaaaatgttgatgtcctatcttcatgttaactctaaaagcacagtagtagttagtactctagtattacatctaatcatctagagatcataatgagcaattttctagaggttccttccatttttaagtgcctctgggtcaaatgttaacataattccaatcaaactaacaagatatgtagcagacaggccatggcaaagggtacaaaattctaactaaaatgaaattgcccataactcatttggcatcccaagagtgaacgtacaggaacagggtgagctaaaaaatcaatagggcccaacaataagaaattcataaaatgattgcaaatcctactcaataacatgtgaaaagtagcttcctctcccaaacttattattgtgagattctgttatgaatccatatgattgtgctaggtgaacgaataatgaagcgacgagtacaaatagaccaccaaatcagtagtagccacaggaaagctggtttcacctcaagaatgtatgaccacagctattgcataccgtaacagaacaacatgccagtaaatgaattgcaacgcacactcttgggaaacacaaatatatactggagctccattatttggattggatagaagctaacatcataacaagatatttacgaacacaaatcaaatatgtactagtagcaacgcttctaccacgctacactttggccgctagctgcagcccggaaaccagaaccgcttgcacgcagccgaaacaacccgcggagctacaacagcacgttgccccccccccccccccgggggtgataatacaggtaccaaatgcatcagatgcggacaaaaacagctcgcggcaggcggaaacaggcggaacccgaccgaagcaacggcattcccgcgagccccggggcggatcgcgcctcagatctacgcgcctagggtccaacgcgggaacgaggcgaggcgaggcgcccgccccccatccccgatccaaccgaacgagcagagagagagggagagagggaggagggcgggagaagagacggtggctgttacctgcgccgcggagaaaccctagggtttcgggggggtcaccgccggatcggtgcgcgtggggaaccggaagcggcgcgcgagcgggcgagcgggaaggcgggcgggcgggcgggcggcggcgacggagggagcgcaggctcgggcggtggaaaccctagcttaagctccgggcggcgggaggggggggagaggagagggggtgggtggtgctcgccgccgcagccgccgcggtgagggaggcaaaggcaaaagggaggaggaggcgaaagaccgagcgaatcgatggtccgcgcgaggcgaggagtttttttttttcttctggtgtttggctccgcgggcgcgagctgagctgactcgtcgcgtcgcctggcttggtgggggggtgggtcgcgttgcgttgttgcgtgctaggtcaggtcgcggtgggtcgtcgggctacgcggctcgtgtcgttcggctgtggggtgtgtgggcggcacgtgccgggcgcctggaagattcacacgccgatcgcagcagcttctctgtttccatttccccttttcttttttggtttctttttctttttcttctggaagtgtattcgggctcgttctgaagtggaatctcttgcgctgacgattccgacacgttttaacctgtacgctagccgtgtcattgcacgtgataaaaatacgaaatatatactgtattctctttttttcttttgaaaatttgagaaaactacccatagctcactaaaatactcatccgttttcagcaaaaccactacttctatcatgtcaaattcaacaccaaataaactatgcctcagggaattggactagttgggcatatttattaaacaaaaacagtacaaacataaatgttcacataaactcgtgcacttatccctataaacacataccgtaccccttataagcacctctaaaaagacatatcttaaatttgactaagtcaccacgagcggctcgctattgataaatatatcgtctaccactaatagaattatcaagcatgctaatacaaatataatctaaaatagactgagccatcccatggcttactcatggatggatccaccttggttttgactagtggtacattcgcgatcaactttggttcatagtgtaccatgttatttcgtatggcagtattctttcttaccgtttaatatttttgtcttgaatgtttttgctcccttttgcatgttgagctaagttgcctcccttgaattcgatttttagggaaaattcaggggtttcattcatcatttgtggtgccttcttctaatttgattgctaataagacaagtaaaaatcctcaagttttaaaaattaaaaaatggatttggcttataatttaaagttgaaacaagtaggccattttgtcacctttgtgtgctcatcctctgtatctcaccacacaaattttcgctgatgtccatctctcttgtgtttgtggcatactgttttgatgaaaagaagaagatggcacttgttttctcagagctctaaaattcacataatattatccaaccttcaattttcataatggtatatggcatatccccaactattgtgatgaattaatccaatgtgtcttcttttcaaggaaatcaaccaaatatgttagttgcgagacaaggtactccctccgttccatattacagatgtcttgggtctatcctaggtaagaccaagtttatagaaaaatgtagcaaatattttcaacactaaaaaatatactataaaatatattcaatggtggtttaatataattaatttgatattatagatgatactatgtgtttctacaaacttgccccaaaccaaaagacatataaatatgaaatgtaggaatacaacacaagcctcaatttggtgagcatagatggatgagccccttaacaacatgttggtttctttagacatgtttggcagtactttaactccttaatctaactccataagcggagtctagagtggagttgttaatcgctctgaaccccagcctcacccctctagttcattttttcataatactctagcccactccactctttatttcttttgtgtgtgtgtgtgtgtgttgctagaggaactatacatcgcactgacacccccccctctagttcatttttttcaaatcactccaatcgggaatgggaatccccagccctccggggtcttcggggcaactgaggtagtgtattacttcaagagacctacaaaatatatatcttcgagagacctacaagatctacatctctaaggtaccgaaaagagggtggagacctataagatttatatcttcaaggtgttgaggaggcagctagcagcttggtgcattttccacagagatgatcattaagaacttgttcatcaacgacatcttcgaaaagcttgtccaaagtaacaagaaaacctgtgaattagcgaggggagaggtctcaagtgccctgggacaacttggggcctcaggcgcgcagcatgcccagggtgtgcggctgccctgaggtgtaagggctaccctcggagcacaatacaggtgactagagctgccctcgaggttctctgctcctctgagtgggcctgaaggtttgacttcaaccaaacatcatgatttctgttgcatgaaataaccatttggagaatagctcatccgcatatgtctaaggacgtggcgccacatgtagcctcatgtgcgcccacgtcaaccaaatgaatgggaggggcgtgacatgtcgcgcccgcatcaactcccgcatggtcccacctcgccacctctcaagggttgactggtggaccccataaccagacagagatttccttgcctccaccaccacttattaagctaataggaggggcaatcacttccggtcagcttgctaggagagacattgacaagtctaagcatatcaaactctttggagtaggtcctgttcttacattcatgtattggcaccgtggactcctctttgcctataaaaggaggatccatgccaacggatagagggctggatttcatagtaattagagcccacacaagtcccatatctcatttgtaacacttgttcctcatcgataatccacatacacatagaagtaggtaatgcatccgtacgccccaaacctgtattcttctttgtgttcatctgttccctgtgggtgactcaggcttgactagccccttggccaaatcttcgagaaggagacggggggggggggggtactcgcttctccgttggaggaattccgtactccaactgtttggttagcatccaagcagaggtggagctaaagctagagtcctaccaaataatccctccaagttgtagatattggtctccaacaatttaatcttaatatttactagttctttggtttcttttaaatccccaattgttgggatttggtttgtaaatgcaatcaatctagcttcatcatgttagtagatatgggtggcaatttcctcgttggagataggggcccacccctacgaggctaggggcaagggagaattctgatcctcgggtaagcagggtaggggcgtagggcccactaattttcgaggatggggacaaggataaaaagaaacccatggtggccagcaaggcgggtataagctacttctctaagagtagccaatttccaaaaatataggcccagttggcccattccaagtggcccatatataaggctaaccctaatccccatctaccctcacctagccccctctccgcagccaccactcctaggatgcctcgtcgctggccattgtgctacgccccatcacgacgccccctctcgtcgcttgtcatctcttcgcggcgcccccttgtcaccagccatcttatgcatcattgcagggccccgaaggagctaaggacagggactgattgcaccccgttcatccctcctgggccaagggtagggatatccgcgggtgagccgaagcaggggtgttccagcccaacccatccccaccataccccgtggtcaccccgataaatagtagaggatgcaataagtggggtgcatataaactaggaatagcattgtgcaatgtggcacgagaatgcccttatagccccacaacagttggttaaaaagactagaaaagacggttggttaaaaaaccaaaagtaagatccaatcccagtttataggcccatgcagcttatcattgtataggcccgttacaatacatgagtatagtactagtcttctctactattataaaattgaagatgtttttaccggtgcttcagtacgtcattcgtgcatgagtcagtttttaagttcgttcgcttatgtttttaccggtgcttcagtacgtcattcgtatatgagtcagtttttaaattcgttcgtttttgggaattcaaatctgtatttgagtcagattttaagtttgtttgcttttagaaatacaagaggagtcgtataagaaatatcttttaaaaaaacttacatgttaacttgagatgatcgaactcctaattgtagttcatgattttctagaaaataatatatccaagcgaattctcacagtgaaatttcaccttaactaaaccgtataacgataataaaattaaaatagacttcacccgttgcaacatatgggacattttttctagtattaataaaatccttctcccataatcccgtaaaagaacataggtagttcgacaaaatcaatgtgcatttttttaaattgcgtttttttccatgcgattaccaaaatctttagatcggactgctcttgcaacaattaacttgaacaatgctgcaacagagttttcacaacagcagcagaaacctagttgcaggttaacacttccagtttcgactgaaatggcatgcatagattctttcaagcagaacagattaacagttaagtattagagagtacatgtgccgatcaatgatcccaacagtttaacaccagcccaaaagttcaggtgttaccagtggacatcagtctgaatgtccagccccttgtaaacatatgacagaaacaaagatgaattagaagactacaactacatgccattgtcactagtttccaagtgcattatggaaatgaaaagaaaaggatatcaaacaccttggcaaatttaatcatcatcgatcaaccaaaaggaacccatccattctacagtggcgctctgttcatctggcaacagccatctaaaacactttcagcagtgaagacaagcaagacatccacagtttcagcttaagcagtgactggcgtttctactttgggggtatcttgtaacttcttctgcgattcttttatatacttccacccacgcttgtttaccccactgatttttgttggcgcttcagcagcttgaacacctggatgagaatcatattagagaacagataatagaaatattgggataccagcatttacggtacatcaaccatgtatattctaacttagtttgagatccaagtatgcctattgacattgttagctgcggcaggtttcaatatcttgcttcaaatccaaaaagcctttgcatggggccagacaacagtaactaggttgtggcctgtcacaacagaacataaaaaagagaaacatggcagaaaaaacagtaaaatgtcgcctggtttccatcatggtatcaactacttagggaaaataaatgctagggaaactaaagcagcatataagcacggaagcagagaacagtgttattggtgagaaatcatctattgatctaatgtaccaaaagctacctactacaattttcatatcattgaaaaatagaaactaacacataaaagctctctttgaagaattgattgggagtgaaaaagaaacattatgatgttgtaggaattatattattcaaggattcaaatactatggatgcattcaaaaaagattaacacattacccgtctttactcaattgtcacagatagggcacggaatttgaatcaagtaacaaccaaatcaaaggagatttaagggtacagttctacgggactcctctacttgtacacaactaacaatgcctgaagagatataaaaatcacacatagatataactgaaagcatcagaaaattaccaactttcatttttacaaccaatagaacttgatcaactgcacttttatcgactcaataacccttttccattgccatgtttttcttttgtgattgttgtttgttacaacctcagtgtggccacagaaaatgcatcacaccttccagttgctaggagtattcgtttatagttttgcaaaagcctacacctggatatttaatttttaagttggcatgattacttgaagcagcaggtttatcttttttcaatgttcatacccctacagaaacttaggtgaactcatatcatatcagaacatcagcccaagcttggtccatgagacgctgaattatatgcaataaccatttgggggaagagcttattctcaaattaagggaactaaaattgaaaacaagtattttggaaaaactctgttagatatagaaggattgtggatcttttatcagtttctagaaaccatggatccagccctgtatgacacaatgtatgaaaaaaagcaaaacattaaaccaagtaagcacaggttgttattcccattgttctaaaaggcagcctagtcctgtgttaagcgtttgtctcctgcctgactagcacctagcgccttggtgaaattcatgagcataatcaaattatttccaggatacaaacagcaaacagaattagagactatcatgtgcaacttcacagattgatgtcaagcatgattatcagcaggcatgtgaagcatgattcatttatgccctctgctgcacactcgtgctataccaaactgctgatacaaaagcaaatcgcatataatacacacaaatctactggcaaacaacagccatcgtataattacacattttaagcagggtatcaccaaatttggaagagaacaggaaaggggcaaagactaaccggccttgtagcgaatcccccacgccttcccatgacgaccatcctgcattccaaagatcacgaaatcacaagaggcaacagaaatgattcgaaatgtgtccgagaaagggggggcgctaaccttgtagaggttgatcttggtgatctggtaggagacgtcgcgccaggtggtcttggcgaccttgtagcccacgccccacgacggcaggaactgcaccacgtcgaacaggttcttcttcttcttcctccccttcgactccttcgccacctccgccgccgccgccgccgccgctcccccctccgcggacgccgcggggctggtgctgctcagggctctctgcgtggacaggggcccgagcccgagggatcgccggagcaggcccaatcccctctgcgccatagccatcgggagccgaagaagatcgaaccaacgcgttactgagagaagattaggaggaggaggcgagctccggcgagcggaggggagaggcggcggcgggctagggtttttgggtggagtgcacgcggagaggctggccgctcaggtgggttcgggaagatctgggccgctcacactgatcgatcggacggtggcagcaaaacctcttgtacacttctcgccgtttttatatacaaatcttaattgatgaatggagaaacctaaacgaaacgtaaatgagccacgtcatccaataaatattagccattggattcataaaaaataaaagagggtgaatgaatcttaaccgttggattagatggatgataaaaaaaatcattcaataggctttcagaagctactggaagaggaaagagagcccagaaagaaataagtagaggaaagatataagattacatatatatttttacgatttacacttatagcaaattattttttaaatgagccctcatattttaggtaagattcattctagggattgatctattaagagcatattcaaaatgtatactcatatgataaattttgtttctagaagttaactgttaatatgtttgagaaaaatgctactaggacatacatattcattccaatgagaggtcatgatctcccaaatatagatttaatgattttcacactgatttaaaacaaacaaaatcaagaggggatgatagaggggtcatgcaacgatgaaaacaactataggatgagatgtaaagtttataataaatagcaagttatttattatatcaccataacatcactcatcctaacctatattcttttacgagcaacaaaaactcaagagaaatggcttaccactctcatgtaccacgtaacaggattttagagtcgcgcgaatgcacgacatgatgtgctagtgtgagttgaaaattcgctccctctagtgctttaggagtttctaaaaatccaaaagaactgctccaaatcaattgaatttgtaaacctaagtttgaatttcctagatgaaaccggccggtttcttgcggtaaatcgattaggtttgattgagattgggttgatctatactgcaaacttattacaaccataaggaaaattgaccagtttgaatggaaaaccaataattaaaaagtgcaatgtttactaatggtacaaattgaagggtgagagcgtaaaacatgttctccaaggaatttcgacggtaacatcaacatattgtctcataggattattttttttattctcacagttccaatttgaattttctgagtttaggtcagtttcgatcttacattcataatgcggaccatagtaaatcaggaaaaaaactgtttttttttttcaaaattcattgcatttgtaaactcattttaaccgatatatctaagagtacaaccatttaacgtatatctaacccaaccatagattacaatctaaacgagttacttctctcctactaaattatttttaggttgaaacaccaagctaactactaacaattcatataatggctttgcaaacctcattgatgacaatttcgacataggaaattctgagtaactttgcaaaaggttttcattttagtttggatgatttggaaagctagaaatgacttttatttcaaaaagaaagtctggggacccattcaagtcaatattgctgcacaaatcatgtcttctaatttcgtttgtgatcttaatgctcaaaatgaagatcatgattctcagattcatcaggttaacaattgttcagctcttaattttgcttcagtgattcgttgctatattgatgcttcttggaaagatggcagtactggaattggtctcttcatacataactctgctactcataaagctcttttttttttcaagcttcatctgaattcttctcttcatctttaccagcagagctagctgcaattatcacaaccatatctatttatcaaaagcttaaaatcactgatgttactctcttatcggataatcaagaactagttaaccttttacaggttcaagacaatgatagtcagcctcatcattggagcttaaatcctttacttccaaagctaatctttcatgcaggaacgcaggctcttaacatcaaatggatttcaagacaagttaataaaatagctgagttccttgccatgaaagctagaggaaaaattggtcaatcacaaaatcaaatagtttgtcaggacatttccacttacattctcattccaactgtcctactaaggatgctttagaatcctctcctcttatggagaatgtatagttggttgatgtaatgtgctcctaaagttaataaagttaattctaaaaaaaaagaaattctgagtggttcacactatagatacatctttacacatgtttttctttcctaatttcagttccgattttgctatatctttgtcgggtgattttctgtataatatttgaccgttttttttggtttgatattgcactacaatagcgggatgaggatgagggcctgtgtttggacatgcctcgtggcagtcaacgtgactcgatctccgtgcgaaattttcgattttgcgcgccgtgtgtgtagagtgactttttttctattgtatttgacgtttcctaagccataggatcatgcgctaagattagtgcagaaaattacaatcctatataactaaaattacattcgtaaattcagttgatacgatatgtaaatgcactgtaattttggtaaaaatattgtgtaagtaaatatgtatttcctttaaaatataaaattacaatcctatataactaaaattacatttgtaagttcagttgatacgatatgtaagtgcactgtaattacactatagttacagtgtaactatagtaaaattacactgtaacttttagtagatgggttggtgatattttttttgcaatgtaaagatctaaaataaaatatatgcaatatatataattaatatatgttgatacatgtatagacccttctaatcaagtgatcaaatgagcctaatccaagtgtctaaaatctgtgtgatttggaccaaaaatctgtcgtgtgatggactttcacctctgctctaccttcctcctctctctcttgtattaggaggagagcggcacgaccagtggaagcatgaggtggcagctcgtcgcggcagcgctccggcaggattcacgccgcagctcgcgctcgtgccgccgcaagaaccctgagctgctgctggagccccggcgctttttgtcacggcatggagtgccggagtgatgccaccatcgacgacctgggccacgcctcgccccgtcggacgagcttccggctgatgcttgtcccaatggccgatgttaactctatatatgtgtgaactgacatgtctcgttccaaaccaagagcagcagcatgagcttaccaactcttcgctctcactgctatacgcttgatcgtcatttgccacaagttaaaattatcaatacaaagctagctgcagtgtccagttcttcgatatccacctaagctctagctagttgcagcataattcagagctagcggccgtagctcgtagtactagctcgatccatggctgcggcggcatcgcgggcgacagacccggagtggcaagtgacggtgccggagctccggagggtgcgacggtgagggtggagcacaaggccggcttccgggccactgtgacggcactactggagaaaccatctttgctaggttggccgaaaacaatattagtcccggttgcaatagaaaccaggactaaatattactttttgtcccggttgaaaagccaacgctatttttatgatctttagtccatttttactcctggttcaaaaagcgtctagccccttactatcgcttcgtatataattccttgcacttatcctctcctcctcgatcgcaaacacttcctcctcctccctttcctcctctctccactctctctttcctctttcttatcctctgcttttctttttcttgcagcagcagagggagcggccgcctgcgcacgggagcgagcggcggggggcggcagccccccgcgcgggagcgagtagcggcggccacgggcgtggcgggcggcggtgcgaggcgacggcggcggcgcagtggtgaaggcaggcagcgcgagaagacggggatgagtcccggttgatttagttgttagattttgctgatttatctgtgaatttgttgatttgtgatgtctttggttgtaaatttgtgatgtgaattgtgactgtggatgtggatgattttgtgatgtttatgtgaatgttgatgattttattgttgagtttggttagaaatcaatattcaaacaacaaaaaacaatgaatataagaaaaataagggactaaagatggtttgtccggattagtccctgttatttcaaccgggactaaagatggggatcttaagtcctggatttgcggtctcggttacgtacctgggattaaaggggttacgaatcgggagtacaggttaaaggggttacgaatcgggagtacaggtttattctccagcagtgcgggtctggaagatcggcgccgacgacccccgaagggtggtgcacggtgtcaaggtcggcctcgcgctctccctcatcgccatgttctactagaccaagcccctctaggatggcattaacgccgccgccatgtgataattctgtgtgttgttgttgttgtcttcgagtataccattggtaaatctgtgaccgatcgatgactgtcagcgtcatgcacttgaagctgcatgcagcactgccgcagagaattctttttccttctctatttgctaaaattcaacccctgccttctttaaagaccgccattctacgtacagcctatccaagtaatgagctatctccctctacacattaacacgtctatatatagctcaaactcactctgcttgcaattggctactcgatggcttaacgttcgctgaacaactcttgcatgcttccatcataagcaagtacagtacaatgcaatactgcatgtagctagggagatcgacgtacatgcatgtgcatatgatttgcccgctgactcactgaatacatatcatgatcttcctttttttttttgttggctccttgttgctgtcctagtcatagttggttcggcatgggaagtgtctggattcgtagggatgtggatcctcttacttaactacacatgtagttgagtcactaacatgtaggtcccactttgctatggctcacatgtcagtggctcaactgcacaacagttaagtcagaggatcccagttaagtcagaggatcccttttcgattctgtcattccctaggagtcggtttgaaagatggtgtttgtggatgagtccgtcatttcccagcaactctactggttctaccatctattcaacggagattgaaatctatggcgggatggtggctcggtgaagggggagaaagatagaggaggttagccatgcgctagaggatttttcacaacttttttttgctggttagtatggaaggatacgcgttctcttcgacataaatgattgttttggctgatcagctgcacataaatgagaaacatgatcaacatatgattaattaagcattaattattgaaaactaaaaaatagattgatttgattttttttcaaagcatcttctatatataaagttttcgctcgaaacacaccattaaacattttgaaaagcttaactctttcaagcctctttcaatgagctctttcgagacataccgttttaacaaataatgaaaaacgagaattagctaagctaatttagctctttcgaaagagcccacatgtcggtggattagttgaggaaagtatatacggccatgtgttaaaacgggtttgttccaaagagctgtgagcaattagcattgggatgtgatgtgaactaagttagttgttttttttttttttttgcaaggaactaagttagttgttgaagcacttgttccacatttgcttctggtggtgaaattttaccaatttgtgtgttgattaaagattaactgcagcacatgtcatctggttttcagcattcactccagggttgatagctggacttgcctatttattcccagtctactttttttctgtagtgaatttattcctattcttttgctctcttgtactatgcatccctcttcagagttcagataagtctgactctttcaacctcttataatgcacaagactatcacttcttcaatttcttccttgaaccactgtgaattgtccatgtctacaatgttattgctgaatctctccccttcccatgataataaaaactgcatttaaatgtgtggtttagcctagcttccttttgctaattaagttcattggcctgatgaataagttcggaatgggaggtattgggtcatgcaaagatttaccactggaagtagcatgatatcctgaatctgcgagcccaactgaagtaaaaacttttccttccagaacgaggcaccgcggtgattaccctgttccaacagagaaacaagaagaaggatagtaactatatgagacttccaactgtggcacatgttttggactttggatcttcatcactctattgacaagtttaagaaacataaacagttgtgcatagtagcaatattgctggggaacagttctcctccgtgatgtacacatcttgtctgaattttgaactgtcataactctaaatctattctctaatcaagattacaccagagataatcagacaatcaaaggaacaagattgtctgatcagagaataaggaggacataaacaatcaatcaaatgaacatattagcagtgggtttatcttattaaccatagccgtgattattcacatttcataatcatagctgtgattcatttgtttcatcacacaactagatatctacatatgccaaatgctgaaccgagccatgcattacattgccgtaagagccatgtattacattgtcgtaagagccaaattaaccgagccccttctcttcactctcctctgctctcgatcataatatctctactcccatcattttaagcctgaaacacccagctacgcagtcaccactcccagccatatttagtttacacacaactcattatatactacatacacccctttcgtatatccattaattgagtcgatcatgccctactactttagtttgggcatgggaggtactaggagatgccaaggcacatagttgtactaggagcttgcagtaatatgattaaggttgggagcttaaaagatttcgaaagagcagtggcatagaatggttactttgtagtgagttgcgtctatagtcaaacattttcacgcaaggaagagctaacaatttggcatgcatgattaatttgctacgatatgtggatttaattcaacagtatttactaaaacttattctgtaaaaacaacaattaattaattagcacatttgtgccttgctaatcctatgtatacgaatgtataatcatgcacattgcatatatgatactagcccacagagtcttaatttgtcatttgctaatactacgtgcatatatagtataatgtgctgagctgttcattggagcttattagttcctgcatcacgtctctttaatctttccaacttgtattctttgtttataagaggtcttgagaatgtcccggatcagtcaaccgatcgatcgggctgctgatcggtcccagtgtaatactctcccacttttgctctaacaatacatacatatagcaatctttaaaataatttttttctcataaactatttatccgacctacggtacgattataccattgtatttattataactaaatctttataacaatatgtcacacgattatattatgatgaaagaaaaacatatgtttcaatccgttaacactttttgttttatatgtgatagtgatatgtttcaatgtgtgtcttcagtgtgtttcacgaaattcctgaaactacctaccactactccctcttctctctctccacctcatccgtgcatgcatgcatgcattttagcgagtttcaaaatgatttttctcctaaactaattatccaatctacgatctaatcataccttgtattcgttgtagttaaatctttacaacaagatatcgcatgattatattttgttaaaagaaaaacatatgtttcaatatgttaatattagttgtttaatatgtgacagagacatgtttcaatgtgtatcttcaccatgtttcataaaattttaatttttaaatgtttcagttgttggttttttcgtttcaccatatataacttgatgtttcactcttgatcaactgaaacatttgaccgaccgacattttttttggcatcggacgcccgacgggaagattcccattgatttctaaagaacaatttaggaataaaaaataatgctaacaagggcttagtaattcatcaatcctcaatttatctgctggcaagcaacatcctcctatagtatgtgatcgttaatccgctccatctgtgtctaaccctaagagagatggagcaaggagtaggggcagccgagcacgggcgtgcacagcggtggcgaccggcgaacacgtaccacggctgatctgattgttgctgagtgctgtgtggtgcagatgctgctgatggatgctggctgctggatggttgcagaatatcattgattcatttttgtgaagcattgattagcttgaaagctgttaaattgaaaagtttggagtaacagaaaaactagccaacggaatcccataggaacggaataagtgaaacgacatccaaacttatttattccccttctatctctctctccagagccttgcttggtcgtcctcctccttcgcctctcctcctctgtgcctctctccctctctaactcctctcttcattcctaatggggctggggcaagtatccatagcaagcccttcaacacggccaaagtgcaagtatccacagcaagcccttcgacaaggccaaagtggtgttagctctcactgtgctagacatcacgtcgttgatggtggtcatgggggctctcgtgtaccaggtgcttaggaagagcttcaacgagttcgagctaggaggtgagattgaggtgtccgtcctactgttgcaggcgatgctcgcaaccatcacggtcgcatgcgtgttgaggatctagcagtggcgctccgaatcaaggatggcaacaagaaggaatggtgtccttccacctctaaggaagatagccatatcatctttgtgcttgccttgtctcttttcccttgtcctcatggctcttatcggcatgagggcctagtatccatgaaacatgcttgatacccacaatgtacctaatgcttaggtatcagttcctaatacataggtatcgtgtaattggtacccagattgttccgactgatatcataggtatcaggcctgatacctggggtagcaaggtacctggtacatagatcagcattaatctcataggtattaggcctgatacctggggtagctactagctaggtacctggtacctagatcggcatgaatcacataggtacaagatctggtactaggcattggatacctgggtatcacatacatggtacctagaccagcctaaaacctaaaggtaccatacatatagcgctgtctatgagccgagctcgagcgagctcgcctacctagtctcgagctcgatacaagctcaagttgagcctataaaatgttcgagctttcagacaagctcgattgagctcgagctcgactgataagcttgatttttaagcagaacaatgtatttcaaggataatcttttaaaacataattaatttctagttcatcatattaatagaagaggaaaaataataaaataaatatatgatgccaatacaaggcttacaaataacatatttgatatcctaatgtattaaataataacaaaaataatatattagctcgttggaagctcgagctcggctcaacaaagctcgcgagctttgggagaggctcgggcttggctcatttgaagcttgaatagagttcaaatcgagcctaggacgagtcaagcccgagcagctcacgagcctcgagcttttttgacatccctacatatgtagtactaggtatcagggtgcatggggtattaggtacctggtaccacctaagtatcgtgtatcgggtacctggtacctaaattgatgctaacatcagcataagcaagtgtgttgtgtctctagtgaaagacaaccatggccctgtagactctcgtgcgaggacgtgaacgtgcgctgacttgtggaccctcgtatggaattgcatgaagttgatagattgacaaaagtggttggttggtcaaacaatcatcctcattaagttatccagttaggacgggagtctgtggtgtagcagtcctcgttggaataattgatttcttgagaaattgatgcgcttaatttctagcatgaccaaagaatatattccgtttgttaatcgctcaacatttaattaagcatatcatgcacaatgatgataaactagttaagcaccataccgatgcatgttactcctaatttgcatcaactgtatcggctttgatactttggataaaattatctgaaatttgatccaaatctatcggggatttctccgataaaagatgattgtacgtatttttgttaactgcacaaataagtcataaaagtcaattactattttaaccctccacccttttttacttggcccaccctttaagtaccttctccctggtatcttttatcataatacgttagattatattataggccatcaacagtcgtaatcaatttcaagcacaaaagaagctttccataaacaatctttacatcctctttacagttcacctaccattccctctacttgtctctctttacaagtctcaccttttcttctcttccctccactgctaggctacgtactgtttagttgtaaatccatttgtttaatttggggatgaatctgaatctggtgttgaatgaagtaatgatttcactatctttgagaaggtcccatattttcaatttggtagcttttagtttcttggttactaagtgtagcctggaggtaccaaaatcaccaaacaaattttttaagtagatgtatctatttcggattggggtgattgacactatgagatgaggatatcaattgcaagttcacagctctcttctcacgttattttattcgtcgacctaaatgcttaactttttgctaagttgctcaacatgggaggtacactggtggagaaaccatctttgctcggttagccaaaatccacaatagtcccggttacaataaaaaccgggattaaagattatctttagtcccggttcaaaagtttagagctgctttttaatctttagtcccggttggtaacaccaaccggtcccggttggtattcgaacaaaagattgtggcggagagtacgaggcatctgccatctgcgagatcgaggaggaggagacgggaagccttatctcttcacctcttcctccactgaccttatctcttcatcccatctcttcctcttcctcctcctcctctccttccctcccccatcatcccttcctcttcctcctctctaacttctcctctaactcctctccttccctccccatcatcccatcgggcggccggcggcctcgcggcggcgcggtggggtggaggcccgggcggtggccttgcagcagtcggtggcgctgcggtgggcggcgcggcggcggaccgcggggcctcgcggcgggcggcggccggcggccggcgcagcagcggccgacagcctgtgttttttttcttttttttaagaatttgtgattcggatctgtgtatttgatttgtgtgtgatgtctgtgaatatgtgatgtatttgtgatgaattttatagaagttgtgatgtaattttgttttaagattttgtgatctatttgaatatggccgatttggggatttgaagattggggataatttatttgggattttgggatggggatagagtaaaatcaatatattaaaaacacaatgaagaaaagaaaataataatagagcaaccggatctagctagctaggctagctctatctttagttaccaaccgggactaaaaaggctctattaaagattggtagtcccggtttgaaaaccggaactatagggggttatgaaccgggagtaaagcccctttctccaccagtgactgggacatgcaaaggtgcttgttctttggtttccctaagtgcatagtgaagttctagggcttcgatcatgtctgctaccatatgcagcactactgatgcagtgatgggtcaccgttcgttgagactctttcagaattgtttcaggagattagcacctttaggcagccttgcacaaatcaatatctccctgtctctcgtgcccaacggtgaatgcttttgaagtacccgcagcttgcaggaagacatggataccaaagcgcttgtgggtaacgtgcttttgagctcttaacctcttagaaatattcaatctaatggtaaatttttcacaggtaatataatatgtatactacataaaattcatctgtgtaccacaaccatgttttttattgaagtgattttatggtctttgagaaggtatcagagacaccaccacattctctgtcgtaaaatttgatacttattaatacctctggtattaggaaataccaaattttgcacaaaagaaattgtgatacttcttaatacctcttaaggatggtgaaaattttggtaccgatatccttctgagacaaactagaaaagaaatatgaatcctctagaaagacatgcaacacagctggactaaagtttcaagtaaactttttttaaaaaaactttcatgtaaaatcatccatgatactcctgcacccctaatactaccattgtcctacattttttggtgtgtctccaatgctttcactatacccacctgccactttgaacttgaactaccatcatgtacgtacagattgatagcaaaagtgctaaattattctcagctgcttaagatacctgcatttgaactatctcatcttcactcaccactctttcctctttcacatgtagtctttcttggcatccttgctatcataccatatatatgcagctctgaatgcatatcaacctcgttgggtagataaatgtgcaataagcatgcaggttgttgccatgtcttggatccttccttcacctccaactcttcatcttttttccattgctaacatcgaccagtctagacttcgttcggcatgggagacatcggaagaaactagggtgcggcatttagtgtatgaaggagattcaagaaagagataatcaattgtttgatatatgtagtcacatggaaggatctgtattgtatcaaaaggaagacatccttttggtttgacaattggacaggcatacatgcttgcatggtgttaaatgagtcgttatttgttcctcatctaaatgcgcaacctaaaatgcaacatggagaacttcatacaataatcttgcagaatctatccttgaacgaagaacaaggcatagctctacgacagataaaaaataggaatactccgctctgcgatctatgacatgaagatgaacaacaacaaagtaaataaaaaatgaaaagtgatttggcacaactctgccctccctgcattcaagttgcatgtacaaacttcatgtatattgagatttattggagatcaaaaagaagagaatgatcatggtcatgatcaaaaggaaaaaatcaattgggagaagtttcgagtgttgtcagaggattttcttttgtgatatacaaaacttgtctaaaatgtgggttgctagaaaattatataattttattcattgatcaggtgatggcggagagaatgacctaaaaagcataagtaacataggcatacataggtacgtgccaaatggagtagtacatatatcaccacatcagtacatgccaaatgcatcacttgtcttcactcccgtctgctccctctcatcatctttgatttgctgccatcgctttaaaccacaaccaccaagcccgccaaccatttaacttacataaatattcttccctattgtactcttcttcttactactcttctttggcaagctcatcagctctggtttggcatgggaggtgttaggagatatagatgcacatagattgtgcatccaactgggaagtagaccaatcttagccatgatttgtttcctttctattggagggcactcaaacaaggtagtaacaccaccattgcctcaggcttttgaagacaaaaatgcacaatactgtcactgcaagaagatagaattaagttcatgattgtggctggtggactgttcgcttactccgataaacaaatacgtggtgttgataaaaaaatcggtttctgaggtttatgtggtgttgatcatattgcataatgaagctagaggaaatggtcgtgtgtagaatccatttcttgtatgtgcttggccttttttctggtacaccgtcagactgcttaaccatatcgccaaccgtactattaaataatttagccatataagtctaatacatgtgtaagtcatatgccatgataattgtatgtgatattaatttccgccctatgcttttactagtcactcccaactttacttaaatcatttaagcttgcactactgttgtgtacagctagtaaaagtattctcagctgcctgccttgcaagttgctatcttcatttgcgctacctactcatgtcactcacccctttatttacaccacaggccttccttgccatcctaccgtatatatgcagcttagaatgcatatctgttggaattaatagatgggctaaggtccattcgaagattaattctttggaaaatcacaaaagcccacctcatgggatggcatgcatgtggagtttagaccttgcttattctaagagagggggaacacacgcgcgcgctcgctcgcctcgcctggcctcgcctggcctggcctgccagggcaggccagggcagggcagggtaggcggcgcgcgtgcacgacgtacgcgtcgaatggtccgcaaaattggctcctcacccttgcgcagatgcagcctccttttgcagttttgttttgctgcgggaaattcggatttgttttgttttgaaaacattccgaaaaatccgatgcgtggaaacggcgtggagtccggataagttacgcgcgacttatctggtttggttacgcggagtggagatcgtgcgggcgccctgatcaagcgacctatctctatataaaccgagccgccgccttcacgcaactcacgcgaaatcaatctagggtttgcctcctactctgtgctgtgccgtcgctcgtagactactccatcccgctcgccggcgtgcaccagcgatcgggagagcaggtctccggaacctctgccttcgacgtcctgcaccgggagaaggcgacaataaggtttttgggaagcgcttcacgcgactgctccctgttcgaccgcgatggctcgccttcctctccgctcgcgtgcttcgcgccttcgtcgacgctcgcaaccgcgagtagttcctgccgagcaaccggtctttccgccacctcggtacgtgttcgacatgttgcgcatatttgatctgttcatgttttactgcctagtttacatgtgtagatctaatgatgcgttcaatctagtttacatctgcaatgtcatgatttatttatggaataaattaaatcattatgtgcttataatttcaacgatatcaacgtcgtaggtagatcagaaatgtgcatgcgagttgcattaccatgtcttattcttccttcacttctgattcttcttcgtgatgttgttcctctgttaacttgtcgaccagtctagccttagtttggcatgggagacatagggagatacgaggtcatgatgtttggtttatgaaggagagtcttgaaaggcattggccataggatttgaattgtacgtgagttgtttgatatattctggacatggattcaactgaagcagttgggtgaaatcataaagttcggggccggctttacataatttatacatagcaggagcagcgttcaagcattatttgaattgcatacacaactttagggatataatgagatgtattgaagattagtagaagagaattaattaccatcacttgttcgtaactaaaaggaaaaatcgaccgctaaagtatcaactatattgccagataattttgttgtgtggtgtataaaacttgtctgaaattcggactactagaaaaacatacattaatatggaagctactggtgacaagagaattaattagtctatcaaggaactaacaaaaggcatgactaactaaggcatccatggacaaccgactaatctcaacctcaggcagcgagctcagctcgacatgcatgcataattaattaattaggagagttttagccctctgcacctggtcctgcaagttatagttggccatgtgagccgcccggcacggcaccgctaggcccggccgtgcctgggctgaggcttgttgggccggcacggcccagccgacgcaccgggctatgctggtgcccgcccacgtgccgcactcacggcccaggcacggcccaacacgactcgggccgacctaaaggcacgacggcctattgtgcttttcctcataataagtctacttttcctccctcctattgagctgtgacatatatatagcttaaaaaagtctattttacctccctcttctttgggctgtgatatataaatagctaaaaaagtctatttaaggtccctattctttagacagtgacatttatatgtctagttttagtccctatactttgtgtgctgggcctggcctatcagcccatcgtgtcgggctggcccgaccgtgccgggccatcctgaccgtgccgggccaccccagcgtgccggtggggaggcccaggcacggcccggcggtcgggccgggcccgaccccatgcttgggccaggccaaaatgccgtgccgtgggccaggccttcgggcctcgggctttatggccatctatactgctgcaagtgtagtgcaaattggtacgtaccaaaagcattcttcactcctagctatctgctctctcatctttaatttgcccaagtcactttaaacctgaaccaccaagccaccaatgactttacatacatgcattcctcctctcccaccatgcgtcagtataggagaatactatcacacatccatgccttttcttcctcttcctcttatttttttccttggctagctagctaggtgagattagccaatactcaatggtttggcatgggaggtgtcctgagataaagatgtactacaatgttaccccaaaggaggaaggggaacaaacatagctatgatttgtttgctttctctcgaagttaatccagtagggaagtatgcatacgattgttcgaggctgcggggaagacaaatctacggatgtgaagccatcaagatagtgccttgatctcctagaggcaactcaaatagcctccatggtattgcaataatccacggaagacatggaagttcattcaagtggtaagtgaccttcgagttgtctcaagggtcttcagatcatcatatcaatgtctaaaatttaaaatacgaagaaaaatttacctgattaaaatttcaagctctacacctggccctatttatttcattatgtgttccaagctcaacagtctctaatgggctagagctgtgtgtccttggagattatttggttggcattcacgtgcggaattggttcaggggcattttgggcctgagccctagtcgtggaaaaaattctaaaggactagtacctacatgttttccgaactttttcaacatcccctggctcagccctactcttctaacccagctcacgcacatcctttcctatccataggtggccaggttccccaacccaatagataacccatcacagcccaatagacaacccaagtactatcctcactcctcatgctacacgcacacgactcaagtgctgcatcttgcatccggccattagcgcctgttcgatgctcctcacctcatagttgggcttacccaataccccaccaaggtgctcccaagggccacttgtgccggatcaagaaccgacactaatgagaagggtcatcagcatcgaaagtttatgtccgttcatgaatcgacgcagatgccaattacgagtcaacattgatgtagttttctgtatgtatttactagtaactttgtacaagagaagtgtacatagcattctctttactcccttatgatctcccttatctttcgcctaacttcttaagcctggattagtcagttagctgcacacccatatatgtctttacaatttaaacaacctcctcttcttaagctaggctcgcctatctgattagattcttccttcctttgctatcctttattgctgagaggatgcatggttaacataggcatactcgacaacacaaatataaacacatgttataattgaatcgaggtcatgaaatgtaagtaacagatattagagtttttttaatatgtatacaaagttagttacaaattagcacttagagttgaaatatgtattataacagaagtagagttgactcttatcctaagctcacttaaatagagagataccatcggttgtaaccacatgacaactgctgcatatatgaggtaacgaccagccagcggcctagccggttgttgacgcaaaatctgacacaacacacgaaggcctgggagatttgcttagctctagtgcagatcctaaattttggattcagagtgtgccagctagtttgatcctataactaacaagatgtaaaagttaaattgcaaggttgatcaaccaaagggccaatatgagatcgtagccaagccgatgctgatggaattcggatcaacgggtatgtaaccaatggaatttggatatataatacaaagcaaactatacaatcattagctgaaactaagtataatataattgttaagaaacttttccttattaaagataatcttgatagatcggaccaaaccacgagacattacaagattgaaactaacaaagataagaaataaacaattatatgaccttgaatattagccgaagtaatgattcagttaataataaatagataactcataggccgaaactccgatgaaactttgaacaagatctatcaaattgaacaaatctatctaacagatcaaaacccagtagattggaccaaccgagatagtatgatattaatgacaagtttgatagatctaaacaagccaataaactctatgcaaagtgattgatatattgaatctaaacaagataacaaaacgatctatgaaaggggcagtatatcagataaacaacgcaaataagagcttaattagaatatcggacttaatcgagaatgtactaattacgctgatacaagtgaagttgatggaacttgcttctcgccagagatcgaactaatgcagcccaactagaaactaagaactcgctgaaagctaaacctagggcggcgatatatatgccgtaagttgtatattgacttggtgataatttacaaagaccaccggtgtatatatttatacccttgggttacactgagtccaactcaaacacgactcgatcggcttaggactctatctacataaaaaatgaaactaacaaacttgccttaggaaaactaaaacaaaaaagaactctaaaacaaaactctatctaatacacttccaactatacctactagaattatggtgtcaatctctttccaacgacctgccatgactaatggcatttgccaaatttcaccattaacactggccgagggtcgttgctaccctgatacattgtaattttgttggataatggaggagtgcactaatcagtgtcccgaggatataggctttggttattcggttaataagtatcgttcctcaatgttgtctgcaaaattggatctcttatggtgttcttccacttttgctaatgacatctacattgctgacggttttataacatcaaatctttagaatccaaggacaatgtccaaagttctaaactagacttagcctttaaactgaaaaattatcactactgaccaggcatcactagcctcaactttcatctacatggttgcagcctgaagaagagcaactgcctacacctaggcttatccatgctctctgtaccaaacacatcgattttattttactcgagaattttgagtactgggattttaagaatccaccctccccttatttacacagcctgatcgtctcgttttgcctctttattggccgttcttccttgccatcctaccatccatcgttgctaggactcattcagtcacaagagaaatgtgcagagttgttctgtctctccttcttcctcctcttttcttttcactgctcgattgccgaacttaattaattgtttggcttaatgacatgggaggtatcaggagacaggaaagcctaaaacgcttgcccccaagcagcttgaaatactacagtggccgaagcgtacagggagggaggtagtggtctggctgaagacgtgtactttgaagctttgatattgtggccttgtgggtgttccagtttaaaggtttgggtgcgttttgatttcatgacctcaacagcaatcgagttgctcagcagcataaattgcttgagatacacaagcacggctggatgacgattccgaattatgatgtatcaactgcataaattgcagccaagttgtttaatttgtcgtccaaaagacatggggggctgggaaatcttgaaatggaaaaattcacaaataaccgcagttgtgagtttcagtgcctaattttaaccatccgtcttatttaaaatatttttatgattagtatttttattattattagatgataaaatatgaataatactttatgcgtgacttgacttttcaaattttttcataaatttttcaaataagacggacggttaaacgttgggcatggaaaattatggctgcacttataatggaacggaggaaacggaggaagtatcaactgcatgtgcagctaagccagctttgtaggtagtagcatgtaatcaatccaatcattcagctagttagcttgtgcatcaagaactgaacacatgagaaaattatgtgcgaatacacaaacaacgaaaatggttacatgaaggaaaaagtacaaattaccctccgaactttcacggtcatctgaattaccccctcgaaccacaaaataggatattcttcacccccaactatgcatactggacgaaatacccccctcgacccaatccgcggtggttttggtctacgtggcgtacacgtggcagtccagtcagcattctattttaaaaaatttgtgggacccgcatgtcatacactactctctctcacttctaactctcactcttcctctctctctatcaccgtctcatggcgagcgaggcagggggcgagcgagacggaggcggcgcgcgggggcgggcggtgggcggcggtgggtggtgagcggcgacgcgagacgaggcggatgaggcgcgcggaggcgggcggtgggcggcagcgcgagatgaggaggctgccgtgcggggcaaggcggaggcggcgcgcggggcgggcggcgcgcgggggatgggtgggcagcgcgcggggagggcgggcgatgggtgggcgacgcgtgggggagggcgggcggcgcaagatgaagaggcggcggcgcgagacgagggggatgcgtaccggtggaccagcacgacagcgtcgacgacgagcgcgacgcgtacaccgccgccgacgctccgtgtcccccctgcctctgcgccgccctgccccgccggagagggaggccgacgccgacgccgacgagctccgcgcgcgcgccaggcggctccggcgctgcaaccgccggagagggaggccgatgccgacgccgacgagctccgcgcgcgcgccacgcggctccggcgctgcaactgcacgctcgcggcgcgcgggcacgccgcccgcggccgcgcgcgcctcgtccgcctcaccaacgcacacctccgcgccgacgccgccgccccgcgtcaccgtccggcgctgccgtcgtcgtcctcccgctgcagtgcacaggcgtgggtgtcgtcgttggcggcgatgttggcgcgcacgaggcagccgagctccatcttggcgccgggccggagtgccgggtcgtgggtgaccagcacggcggcaccgcagctccgcgccgaggccgccgccctcagtcgccgcccccgcgtcatcgtcccccgcctgccgctgaccatagtgagagagagaagagagagagaggaagagtgagagagagagcaagagtggaggaggagtatgacatgcgggtcccacaatttttttaaatagaatgctgactggactgccatgtgtacgccacgtaggccaaaaccaccgcggattgtattgaggggggggtatttcgtccggtatacatagttggaggtgaaaaatatccggttttgtagatcggggataattcagatgaccgcaaaagtttaggggggtaattcgtactttttttccttacatgaacgatcaacccaagccggggtgggggtgttcggtctagaccaccaatgttcgcgaggagggaacctcataaaccaacagccttccatcctttttcaagcctagttattggcttaattacgtgcctaatcaggattagcatttaactttcgttaaaaaccaaatccacgcatgctttatattttatatttttttgttacgaggtttgcaacgtttgttcaaatattagattctattttttttttccaaaaacataggcattatatattaaactaaactttctaaatttgaatatgatcagcattttttatttatatacataaagtatgtctatataagtatatatagaaagtttccaagaaataattcatacaaaaaagtttctacagataaaatttaatatataatttatatatgcaattagaaagtttagtgtataaatttcacaatccaggagactgtcacaaccctactgttggtataattaggtttacttgtctgtgtctctgtttgtaggttgtatatttaatatatttgcatgagcttcttcatacaaataaaaatcggaacaaaatataatcctaatcggtaaaatagaacaatatttctaaatgtgcataaagtagaatagaaaggagaggtttcataatttattcaaatactagattatttatcataataatatattttccagaatttatgcgataaggtttgaaccgttaaaaattaaaacaagtttcagcctcagtccttgtctttaaatttatgggagcaaaatgtttcatattttgaaatgcaatccattaaaatggaatctaggtgtactggactacctactcacaatcataaaatgtcggaaaaattcctgaaaaatctgaactctgtgctctgagattggccctgatccagcaagtgtagtacaaattggtactaccgaccaaaagttagcattcttcactcctatttgctccctctcatctttattttgctcccatcacttaaaacctgaacctccaagccaccaacgttttctcctaccctccgtcactaggagaatgctatcagacatacatgtctttttcttcctgatcctcttttttcttggctagctagctaggtgatcggccaaaactcactggttaggcatgtaaggtgtcatgagatacagatgaactagaatatcaccgcaaaggaggaaggggaacaaacattgctatgatttgtttgctttctctgataagccactctagtagggaattatgcctacgattgctcgcggctgcaaggaagacaaatccacgggaatgcagccatcaagatagaaatggcttcattgctatgatttgttcgctttctcctagaggccgctccaatactgtcaaggctattggaagccactgaagatatggaggtttcatcttcgtggtaaatacctttgaattgtcccaaggatcttatcatcgtattagtgtcgagaattccaactatgaagaaaactttgttggattaaaatttctttcgcgtcatctggagtgagtccacttattccctaatcaaggcgctgctcgatttatcacttattagacataaattgcgaaacggcccatgaaagtcaagaacgggacgcgtagaaaactctggggctggccctatttattagtacatgacgtgttccatgtccaaccgtctccaatgggcttgagccgtatctccttggagatgaatagtctgattagaacatgtggaacatgacattaatttgacataaaagccctgcgttagcataataaaattaagatatatagcaccagcatgtggtagatatgggtgataactttgtgcttaatttgctctgtgcttcctactactctgttctctattcctctttgcaccattgctgttgattctgagcttccctcaggctccaaatttattattccatcttgtcttcttgctatcagtggcatctaaaattaccatctacatccaatctctatgccaattggaagtgttgtaaaccaacttgatcttcaatgtaaatggaggggttccacaacatatatatataattgcataagtatggattccaagcttacttggagctggaggttgttggctcctcctcccctcttcatttttgccatatgtaagtaaagcataattgcaaatatgttggtttcacacatgacgggatatccatcaccaataagagaagaacacaactgttttcttttgtcagttcacttatgtccgcatccttagttggttcaaagcctgcaagttatactacctttgtccaaacactgacggacctaatgattaactagtttgggatgggatgcaccaagacatgtaaatatgctagcgagctgattttaccaagcctcactggaaggaaaagtttttcatttggattttttagggtcagttgtaggaaaaaagaagtagctagaggcataattgctaaccccctcataggttatgttctcttcatgtcggtggcgaaagatttgtgattgcaacaacgaaataaggggaatatggtttgtcactttggtataggcatgtgcaaattataagtagttgccgcaacattttgttttctcatcatttcaagccttaactagctgcatgtacactctgaagtatgatctctccacctacccttcatcacataacaacctcgcctcaacattatttaaacttgcacatgacttgagtaagatgtgcaataggatgctgggtcttctttggcctcctcaacttctccgtcttctccttcacagcttcattttggttcattgctctaggtctcaaggtcattagtttggcatgggaggtattgggagttatcaaggcacaaacatcaaatctgatggaagatgcgaggacataccgagttcgtggttcttcaatatgggcattcagcaaatctgctagagcagagggatgaaacttaaacggtccgtaggatcgtcagccacagaaccattttaggtgcacatgcagatacaaatacataaagacatatacatggtatgaattagaatatggttggtggctagtatggattagaatatatgtttgtttgttttacgctgcatgcccttataaatctcaactgtaatctacatgaatgatgcatgctctctgcagttatgcaacttggaaagttgtatactagtaacttcaattactacatctaatcttgccagaggaatacgataacgtacataccattctctttactcccctatgatgtccattcttagttcttactcctaccatttcaattaaacttgaatcagtcacttagctgcccgcacattaagtatgtgtttagttggatggttttcctacgttgggttttttttttcgagaacctcctaggttgggttggtttgggtcgaaccccttaccttaaatgtttggttatagcactaggtgggatgggttggttccaaaaacaaatattccattgatatttgggttggtttggcccatgaagaagaaaggtctctcatgtcagctactcatccttgaagaaattaacaaggtcgacgacagtagatggatgagataggttatgcacatgtattatgctctttgtggaaacatattttcataagtttgtgttacctttgcattatatgcacaatttagtttttttttgttttcttgtgacgagctcacaagtatgaaggatattgagaattgtagaaataggccttggtaagtcaactgaatcatgtatagaattgtatgagtacatttggtcttgaggagtagtttgttgggcaatttcagtgtgtattgtcaaaattgcacatctgtacttgcatatttcaatatgtcatttatatctttatttgtagaactagcagagtttctcaccttcattcctccatacaaacatgtgataggaccattccatcctcttctatcccacaacccccccccccctccccgccccccaaaaaaaaagctcactccatccctccaacctaatagaaataggaccatcctatcccaaaatcagggatggatacaacccatcccaccgtgttcctaaaccaaacacatgctaatatatttgcaattcaaacaacctcatcttctcctcttcttaagctaggctcgtctatctatttagggtattccttccttctctatgcttcattgccaggaggatgcatggttgcatgcccacttcttttttttcctctttggatagctcattgatttagggcatttaattcggcatgagatgcattggaggtattgagagacctgaatgaactatcttatcatcaacatagagactataatggattaatggttcatttgctgtggtctatgagctctctataagacaattaggtggaagaagtacatgtaagtctagcagaagcttggaagctcaaaatatttgaagatcatacaagagaagtgatagtcaaattgtgtatgatactagagaatcaaatatcttgagatacatagaggtatacatcaagcgaatcattcgaataagttacacgagtttccacgtgattgaaatagtttttttccctttcccctttcctccccgacacataatttctctctttctctgttctgttttcttctctcccaactttttacctgttggtgacttgctcttttctcatttataaaaagccagcacaagttttcccattaaaatatatatattttttcactagttcaataaaaaaagttatttaaacttggtaggatgaggacttagtgttgaaattataagcacataatgatttaatttattccataaataaatcatgacattacatatgtaaactagattgaatgcataattagatctacacatgtaaactaagcagtaaaacatgaacagatcaaatatgcgcaacatgtcgaatacgtaccgaggtggcggaaagaccggttgctcggcaggaactacttgcggttgcgggcatcaacgaaggcgcgcagcacgcgagcagagaggaaggcaagccgtcgcggacgaacagggagcagtcgcgcgaagcgcttcccaaaaaccttattgctgccttctcccggtgtagaacgtcgaaggcagaggttccggagacctgctctcccgatcgcaggtgcacactggtgagcgggatggagtagtctacgagcgacgacgcagcacaaaggaggaggcaaaccctagattgatttcgtgtgtgtagcgtgaaggcggtggctcggtttatatagagataggtcgcttgatcagggcgctcgcatgatctccactccgcgtaaccgaaccggataagtcgtgcgtaacttatccggactccatgccgttttcacgcaccagattttttggaatgtttcaaaaacaaaacaaatccgaattttcctgcggctctgcgcaagggtgaggagccaattttgcggaccattcgacgcgtacgtcgtgcacgtgcgccgcctaccctgccctgccctgccctgccaggccaggccaggcgaggcgaggcgagcgagcgcgcgcctgttcctcatcttctctccaccacacatgcttcaagtggctaggagggcatcctcccttttaaggaggtccccctctcctagaataagcacggtggtactaaactccacatgcatgccatcccatgaggtgggcttttgtgattttccaaagaattaatcttcgaatgggccttagcccatctattaattccaacaatccccaccaaatctcaaaatcccactgagatttgccttttccaatgtactgtttatataccagcggttcgatagagaccgattaaggttgaacatccacctagaactccaagctacacttactctctccttcgatgcattgtctatcacatttcgtgatagtcccttcgtgaagggatctgctaggtttctagctgtttggatgtaatccaacgttataactccggagtttctcaatttcctgacagacttcaatcgtcttttcacatgtctagacgatttcatattatccttagaactatttactttgatgtcacgcccagaaattctcgaaacagaatttctaagctgaatgtgcattaaatccctgtccaggaccagccagggtacacaaacgacaattgttgacatacagacccacgtcttacaaaaatataaaagattacaaatgcagcggaaaagattaaagcgagctaaaccgggaaacttgacttcagcagcgggcgactccactccacaggcaaaccttgacggcagcaacgaaaccaacctccctgagacggctccaactgagaagaacttcaactctggtgtgggggaaaagagagcaagactgagtactacccactgtactcagcaagtcataccggaagaggaggtatgatgcaggatataaccaaaggaagctaggggttcttttgcataaagcaggcatttcaaagcagtagttgaaagcagtaaaacagctgtagtaattaatcaatattaaccaatcactgtccaacgctacaccacgttgcacatggccggagcagcgacgtggccggcgctcgcgggaaggtgaggaaagaagggggagggaggactcaccggcgacacggcggccggagcggaaaacgaaggcggcgacgacgacccgacaagaggaggggcggacgagcggtggcgacacctagaggaggggaggagaggagttagggatggagaaggcgaccgcgacgaccaaaatggctggccggagacggaggggaatggatagctcaccggctcgcgagggagatagggttccggtggggttccggcgacgcgaggcggtgaccgagatggcccacacggcggcggagctagcggcagcggccctagtggcgacggcacgcggccggagatgggcggcggcggcggcgctagtggcgagcggcgcgcgaccggtaggaggcacgggagagtgcggcgaaaaggggaaaagggagagggagatgcggggaagctttataggggctcgaaaggggcggacatggccgggaaaccccccgatttggccggcgacgtgggggaaaagagagagaaagtgggggggggggaattcaaatcgaatcccgcccatttacgggcgcgcgtgcgggccgggagatgcgggggggagagggcggcgacgtgggcgcgaggtgcgggcgcggagtggaggcgcaacgtggagaaggcggcggcgcgggcggtttcggcggcggttgccgtcgtggggcgggcagctagaggaaggggacgacctgacaggtgggccccacctgtcagcgtcccggagagaggggaaggggatcgggccggcccaaaggaaggaggccgagcgcgggagggagtgggccgacggcccaatagagaaaaaaaagaaggaaaagaaaaagaaaaagaagaaaggatttttcctgggattaaaaattgcactttggtgatttttaattggttaaaattatttccaaggctctgaaaattccactaaaaatcttgttaatgcattggagcatggggaactcaagaaaaattccaccacgctatttctgattattaagtgcatttattaactagggatttagctctaggttaattaagataatttcttcgggcaatttatttaaccaatttttaaagcaagaaaagggggaaacttctgggcgtgacaaacctaccccccttaaacggaatctcgaccccgagattcggaagagctggcgaagaggtgcgggtgggcggccttcaactcatcttctctttcccaagtggcctcttcctctgagtggtggctccactgaaccttgcagaatcttattactttgtttctgatccttctctcgctggtttcgaggatacgagtcggcttctccacatacgtcagatctccctaaatttcgatgtgatccggacttgcctgttcctcaggaactctcaaacatttcttcaactgagagacgtggaacacgttgtggatgccaagcatgttggagggaagctcaagctggtaagcaacttcacctctacgttccaagatcctgtatggtcccacaaagcgtggtgccaactttcctttggtttggaagcgatgtactcccctgagcggagtgacacggagatacacataatcccctgtttcgaaagcgagctctcttcggcggttgtctgcatagcttttctgccgagattgcgcgattctcaatctttccctgacagctctgactttctcttctgcctcatttaaaacttctgtaccaaacaattggcgttcccctgtctgatcccaaaagagcggagtacgacaccttcgtccatacagtgcttcaaacggtgccatctgcagactagcttggtaactgttgttgtaagagaactcagcatacggcaagcttttgtcccatgctccaccaaagtcaagcgcacaggctctcaacatatcctctagtatttgattgactcgctcggtctggccatctgtttgtggatggtaagcagtgctgaaattcaaccgggttcccaattcttcttgtaatttctgccagaactttgaagtgaattggcttcctcgatcagacacgatcttcttaggtacaccatgtaaacacataattcttgccagatagagttctgctaatttcttccctgagtaggtagtgtgcaccggaatgaagtgagccactttggtgagtcggtcaacgactacccaaatagaatcatgccccgatgacgtcctgggcaaaccggtgatgaaatccattccgatttcttcccacttccattctggaatttgaagtggctgtagcaaacctgctggcctttggtgttctgcctttactcgttgacagacgtcacagagtgctacgaattcagctatttcccttctcatgctgacccaccagaacttctctttgaggtcttggtacatcttagtactaccgggatgaatggaatactaagtttgatgagcctcggttagtatcaggtcttttaattccttgttttcgggtacacacaatctttctcccctccagattgttccttgttcatcctcaacaaaacctcgggcttttccaactctcatgttctttttgagctctgctatttcaggatcacttgcttgagctatgcgaacctgctccaccagtgtgggctgtgcctctagggcaaccacgaatccgtgctcaactataccaaggttcagatgttccaaatcgcgttgaacctcacaacatagttgctctacccatgcaacattgcagtagctcttcctgctcaaggcatctgcaaccacattagccttgccgggatgataatgtattcccatatcataatccttgatcagctccaaccatcttcgctgtctgagattcaaatcaggttgagtgaagatgtactttagacttttgtgatctatatatacctcacaacggttaccgatgagatagtgccgccaaatctttaaagcatgaacaattgcggccaattccagatcatgcgttgggtagttgccttcatgaggacgcaactgccgtgaagcataagaaaccactttgccatcctgcatcaacacacatcctagcccctggcgagatgcatcacaatagacctggaaatctttcgtctgatcaggcaggattaagactggtgcagacaccaaccgtcgtttgagttcttcaaaactcctattgcattcggcagaccagataaacttttcttccttcttcaatagctgtgtcattggcttagcaattttagagaagttctcaatgaaccggcggtaatagcccgcaagtcctaagaaactccgaacctgagtgactgtccttggtggggtccatttggtaactgactccacatttgctggatccacagctactccttgagcattcacgatgtgaccgagaaactgaacttccttaagccagaagacgcacttgctgaacttggcatatagttggtgcgcttttaacttttcatgtaccagccggagatgctgctcatgttcttcctcggacttggagtagataagtatgtcatcgatgaaaaccacgacaaacttgtctagaaattccataaacaccttgttcatcaaattcatgaagaaggcaggtgcattagtgagtccgaaagacataactgtgcattcgaacaacccgtaccgagtgatgaatgctgtctttggaatatcctcttcgcggatcctcaactggtgatagcctgatcgcaggtctatcttagagaacacagtagctcctttcaactgatcaaacagatcatcaatccttggcaaaggatacttgttcttgatggtgacctcattgagtgcgcggtagtcaacgcacatcctcttggttttgtctttcttctccacaaagataaccggagcaccccaaggcgacgtgctcgggcggatgtatcccttctgtaactgttcatcgacttgcttcttgacttccaccaactcgttggctcccattctgtaaggcctcttgtggatcggtgcagttccaggtaccaagtcaatccggaactcgatgtccctttttggtggcattgttgtcagatcgtccggaaaaacctctggatactctctgactatgggaatatcctccagcttcttagtggttttctccactgctacctcttgttcttcaccagcagcctggtttaaactgatccctggcttctgcggcactggagactggaagattaccacctctccttttgcattggtcaacttgatggtgcggctggcgcaatcaatcactcctctgtgccttgtcaaccaatccattccaagtatgacatctaggtccttggattcgagaagaatgaggttggctggaaaaatcaacccttgaatttcaactgtcacagatgggcagtagtgagttgtggtcatgccacctccaggagtatgaactcgcattggtatcttaagcttcactaaagataacccatgtgcaccagcaaaacgcttggaaacgaaggaatgggttgcaccagaatcaaacaatattactgccggtgtcgagttgacggggaatgtgcccaatataacctctggtgctgattgcgcctcctctgcagatgtatgattaacacgggcctgaacgaacttgggtccagcacgtcttggcttcgggcactttccaaccgtgtgtccgggtttgttacaattgaagcagagttcgggtttttctcccaacctcttgggctgttctggcagagctggctgaactgattgagctggaatctttagtgaactcggagtagggttgaggctgtgctgctcactgttgttgtgactatcactatggtggttcttgttgaagctacccgggtggtagggacggtgctgccggataatcatggtggaaggtccaccgtgacgtcccatcgtgaaacgaggcttctgactcttcccctggggagtcctgaactgagctgccttcctcttacggttcattttgttacactgctcctcttgacgaatagccttgtccacaagcttctcaaagtcctcataatctctagagatcaactggttagtcaattcatcatcaagaccagacagaaacttctcctgcctcccgtcatcggtacgcacgtcctcaggggcgtagcgtgcgaggcggttgaactcatgcaaatactctataactgttctggttccttgttgcagggaacggaactctctcttcttttgtgccacaattccctcgggaatctgtgctttattgaaactatgacgaaactctgtccaagtaacttctgccccagttggacaggtcaccatgtagttgtcccaccaaatagaagcgggaccttgtagctggtgtgtagcaaaagcaaccttctcctgctcgttgcattgcaaaagattcagcttcttctcaatggcatgaagccagtcgtgggcctcgattgggttggtggtgcttgagaaagtgggcggcttgacacgaagaaattctaacagtttggactgaggaggtggaggaccaaactgcaggttctgctgctgctgctgtgcttgctgctgcacctgttgcaacacctgatggtactgttgctgcatctgttgcatcatcattgtcatcatctgagtctgattgtccaacacctgagcaattgttgggttcttgggcggtggggacggactgttgtcagatgcaccgttggcacgtgctccattgatcggctcttcgctgccactggcgttgttggagtcgcgtgaaccattccttgtctccatctgaggggataggtagaaatatgagaaaaggaagaaaacaggggctcagaaactaatcttgcttatgaatttaagtgcaattatcttaatcttgattaaaacactgaaaaagaggcacgcaactcctaattgaggcagtcataccactgacacatgatatcgaccgccgactaacccacaagcaacaaacctaaacacgaaaactagcaagcaaacagactaagaaggcgataaagctaagggcggcgactctgaagctcgggcggcgcttgaaacgagggataggactgacatctaaagtagacaagggataggaaccaattcatgctcaaatccaaattaaacaaagcaaaagaagactcaaataaataaccaagcatgatgattttatgcatagaacatttttcatgaactcaaatgaggatactgatgcaactggctaatcaataaattaatgcataaaataaatgcatagctataatgatacgcatgaaattgcccccatcaacctagacacgacttagtgcatatcacctgataaattcccgactgactgtcgaataaaccccaaaaaaatttttttttaaaccctagactgagctaaatttaaaagatccgatctgaatgaacgaccaagattttccccaccaaccaaagaggcaaaaccccacattttcccgaaacaaatccaagtgaaaagggcatatgcatatgaaaaggggttcagagggctcttaggttttccagttggcttgtcctacggtcaaggtcggctctgataccaacttgtcacgcctagaaattctcgaaacagaatttctaagctgaatgtgcattaaatccctgtccaggaccagccagggtacacaaacgacaattgttgacatacagacccacgtcttacaaaaatataaaagattacaaatgcagcggaaaagattaaagcgagctaaaccgggaaacttgacttcagcagcgggcgactccactccacaggcaaaccttgacggcagcaacgaaaccaacctctctgagacggctccaactgagaagaacttcaactctggtgtgggggaaaagagagcaagactgagtactacccactgtactcagcaagtcataccggaagaggaggtatgatgcaggatataaccaaaggaagctaggggttcttttgcataaagcaggcatttcaaagcagtagttgaaagcagtaaaacagctgtagtaattaatcaatattaaccaatcactgtccaacgctacaccacgttgcaacaggcccaaccaaccacctgaactacaccagttcattaagctaaactaggggtgagactaatcacggtgaatctggttgatcgcccataaccgcgggcacggctattcgaatagttttactctggccagaggtgtacaactgtacccacaagacacgattccacacatgtcgccatgccccgaagtatcaccatgatactgcaaagggggaaatcgtgacaagaccctccacataaccctcccctaaccatccacaccacgctaaggtttcacccccacccctcaaaaggcagtgggcggtcccctcttgcgccgcggtgaatccggcagctggacaaccgaacacctcggccgacccaactccatcacgcccaccctcgccaccggtgcctaggaaagggtcgagctatacttcagatcaagcagttacccactcccgcttgtggtaagcacggtaagtctcccagggtttcccgtgaaccggtccttaactgctatgggtgcgaccagcaaaaccatgcactcacagcccgccattctgaatattttaattaactgacacccttgcggtggcaccagtccaaagctatgctaatagtcagagtctatgtaataatgtgatccctttttgtgtgctagttgagctaagcatggctaagcattttctaaaccaacatctaatcattttgatacccaggttatcaatggcatatggtaaacaataaatggctgagtaataggacccatcccacatgacattgtaaaagaatgcaacatttaatagaaatgcagggtgtttgtaaattgggtacaatatgatcaaatgtaaagcatgacttgccttgctctcgaactgatgagacctcagcaacgtcttcgagaaaccgcggatcgacgaaacggccaaaacctacgcgacaagcaaagcacacaagcaaaacatgctataagactactgaaacaggaaacaaaaccatttttaatggattctttgcatttttcttgatttactgagacttgaatggacttaaacggagctcggatgaattacttatgaattttagaagataaactgtgtttgtactaataaagaaaaagtccttaattaattattgcgcaataatacccagggctgacgtcatccaaggggggggcgccgacaggtggggcccatgagtcagcggctccaaagggagggaggtggcgcctggcaggtgggccccaccaggcggtggctcaaaggggaggcgagggaggcgccggccgggctcggctcggcctcaaggccgaccggccgaccaaggcgaggcggcggcgaggcacagccaccgacggcggtgaccggcggtgcgggaagcggcggcgatggccgaaaggcggcggcgcatggccggagcagcgacgtggccggcgctcgcgggaaggtgaggaaaggagggggagggaggactcaccggcgacacggcggccggagcggaaaacgaaggcggcgacgatgacccgacgagaggaggggcggacgagcggtagcgacacctagaggaggggaggagaggagttagggatggagaaggcgaccgcgacgaccaaaatggctggccggagacggaggggaatggatagctcaccggctcgcgagggagatagggttccggtggggttccagcgacgcgaggcggtgaccgagatggcccacacggcggcggagctagcggcggtggcggcttggcgcggcggcggccctagtggcgacggcacgcggccggagatgggcggcggcggcggtgctagtggcgagcggcgcgcgaccggtaggaggcacgggagagcgcggcgaaatggggaaaagggagagggagatgcggggaagctttataggggctcgaaaggggcggacatggccgggaaaccccccgatttggccggcgacgtgggggaaaagagagagaaagtgggaggggaattcaaatcgaatcccgcccatttgcgggcgcgcgtgcgggccgggagatgcgggggggagggcggcgacgtgggcgtgaggtgcgggcgcggagtggaggcgcgacgtggagaatgcggcggcgcgggcggtttcggcggcggttgccgtcgtggggcgggcggctggaggaaggggacgacctgacaggtgggccccacctgtcagcgtcccggagagaggggaaggggaacgggccggcccaaaggaaggaggccgagcgcgggagggagtgggccgacggcccaatagagaaaaaaaagaaggaaaagaaaaagaaaaagaagaaaggatttttcctgggattaaaaattgcattttggtgatttttaattggttaaaattatttccaaggctctgaaaattccactaaaaatcttgttaatgcattggagcatggggaactcaagaaaaattccaccacgctatttccgattattaagtgcatttattaactagggatttagctctaggttaattaagataatttcttcgggcaatttatttaaccaatttttaaagcaagaaaagggggaaacttctgggcgtgacatttgacaattaccgtttgattatcacagttcataaggatagccggcaccggtttttcaacaatagggagatccattaatagatcacgtagccattatgcctcaacagtagcagtatccagtgctgtcaactctgcttccatggttgacctcgtcaaaatggtctgtttgcaagacctcgacgaaacagcaccaccacgtagtgtgaagacatatccactagtggctttgatctcatccacatcagagatccagttagaatcattatatccttccagtaccgcaggatacccagaatagtgaagcccaaattccatagtacctttcggatagcgcattactcgctcaagcgcacgccagtgatcatcttccggattagaggtaaaccggctcaacttgctcacagcaaaggagatatcaggcctagttgcactagccaagtatatcagcgagccaatgatttgggagtattccagttgattcctagcaattctcttgttcttgcgaagcaacaagctaggatcataaggtgttggagaaggcttactatcaatgtagccaaagtgattcaagatcttctccacataatgggactgcaagagtgtaatcccattctcacctctaattagcttaatgtttaggataacatcagctactcccaaatccttcatatcaaatttttgagcaagaatgatttaacctcatttatcacctcaaggtttgtcccaaatatcagtatgtcatcaacataaaagcacagaataactccctcacccccaccatggcgatagtatacacatttaactgcctcattgactgcaaagcttacagatgtcaatgttctatcaagtttctcgtgccattgcttaggagcttgtttcagaccatacaaagacttcaacaatttgcacgccttgtcttcttgaccttcaactacaaacccatcaggctgatctatatagatcacctcatccagctctccattaagaaaagttgtcttaacatccatttgatggacgagaagaccatgtgaggctgctagggaaagtagcacacgaattgtggtcaatctagcaacaggtgagtaagtgtcaaagaaatcttcgccttctttctgagtatagcccttagcaacaagccgagccttgtacttttcaatggtaccatcaggcctcagcttctttttgaacacccacttgcaccccacaggtttacacccatagggtcgctctgtcacctcccaagttccgttagcgataatggaatccatttcactacggacagcctccttccagtagtctgcatcaggagatgcatatgcttctgaaattgacttaggagtgtcgtccatgaggtacacagtgaaatcatcaccaaaagacttagccgtcctttgtcttttactccttcgaggagcttcactgtcatcctcctcagtgacatgttcatgcgtatgtttagtttgttctggtggtgtgattgagttgggaattatttcagaggtttggctagaactactatgtgtatccttcattgggaaaaagctgatctcaaagaagttagcatcacgagactccatgattgtaccaacatgcatgtcaggtacctcagatttaactattaaaaatctataggcaatgctgtgatgagcatatcttagaaagacagtctacagtcttaggtccaagtttgcacttcttcgttattggtacattgactttcgccaagcacccccatatgcgcaagtaagaaagtgatggttttctcccaatccatatctcatatagtgttttgtccttatttatgttaggaactctctttagcacatgattcgaggtcaacaatgcctcccccaccaagccttaggtagtcccgcggtgtccaacatggcattcaccaagtcagtcagtgtgcgattcttcctttcagcaatcccattagactcgggagaatagggaggcgtcctctcatgtatgatgccatgttcctcacagaataagtcaaactcgtttgagaaaaactctccaccacgatcagacctaagcctttttatcttcctgtcaagttgattttcaacttctgccttataaattttaaaatagtctagagcctcgtctttcgttttcaacaagtacacatagcaaaatctagtagcatcatcaatcaacatcacgaaatatcgttttccacccttcgtcaacaccccattcatttcacaaagatcagaatgtaggagttctagtggtgccaagtttctctcctcggcaaccttgtgaggcttgcgaggttgcttcgattgcacacaactatagcacttagaacctttgacaatggataacttaggaattaaacacatgctggaaagccgagacatcaagccaaaattaatatgacataaacgtgagtgccaaacataagccttatcatccacactaccacaaatatggttcacagacttattgtagaaatcagaaagggaaaagcggaacaggcctccgcactcataacctttaccaataaaatatccatgtttagacacgactactttattagactcaaaaaccaacttaaatccgtctctagtcagacgggagccactaacaagattcctgtcgatagaagggacatgctgcacgttcttcagttgcacgatctatcccgaagtaaacttcagatctaccgtgccaacaccatgaacagaagcatgtgacccattccccattaggacggtggaacccgtgcgacctgataagaagaaaacaatgagatgtcagcacaaacatgtacattggccccagtatcaacccaccaattagtagactaattaactgaaaaaacagttgctaaattaccatactgcttccatctccagtgttgccaatggtcacattagcaaacttagaggtctgccctacaggtgccttcatccccttgcgttgtggacacttcctggccagatggccaggttgaccacacacaaagcaagtcctctcatcctgattaggattgttgttgttcttcttcttaaagttggtggtctgctgagctttgtatttccccttgctcttgttctgggccttgtgcacaacattggcagtggactggccaccatcgcccttagacgcgacatctttttcccgagctttctcctcaacatcaagagacgctatcaacccctcaacggagtattcctgtctcttgtatttgagtgcagtactgaaacctctccaagatggaggttgtttcgcgataatgcacccggccacaaatttgtcgggtaagacacacttaaggagttcgagttccttagccatggtttgtatctcatgagcctgttcgactatagaacagttgtcagccatcttgtagtcatgaaactgctccatgatatagagatcattgctagcatcaatagcaccgaatttagtattcagtgcatcccacaactccttagcgttggtcatatgcatatacacctcgaccagacgatcgtcaagcacgctaagaatgcatcccacaaagagagtagtggcctcatcgaattttttctgctgatcagcattaagaatgcccataggcttgccagtactcacccagaagcatttcatagttgtcagccacagagtgaccctgatctaccatctcttgaagtacacaccggtgaatttatccggcctcagtgtatcggcaaaactagccatagtaaaatcacagtgcctacaataagatttttggattgttgaaattataagcacataatgatttaatttattccataaataaatcatgacattacatatgtaaactagattgaacgcatcattagatctacacatgtaaactaagcagaaaagctgaaagcttttctgtgcttagatggctggttgatctatgtgccaaagccaattagttcggcatgggaggtatcatgagtatgtgcttatatcaatttcacggaggatatgcgaccatcagaattgttgtgtgttgttagcttcacgtagacacaacttccgccatagaaagagatcaaagctttaaacatcgaagtggtttgggttgtcagataatcaattttagttgtacacacaacttcaaatgtattgagcatttgagctacatatcctgatggctgatgacatgagtgtgttggctagcatatcctggagcaacatttaaattttctgtctttttgtctgtaacttgctcttctacttggcccattcaaaatatatagtgaaataaaattagtcactagtacaacgagaaaaatactaaacaatgttggggaagaacgttttcttgtgtgatgaatgacactttttcttgaaggaattatcccttccaagaagatttgtgaattaggacagtggcatacacgagaaacattagcgaaaattgaaccgggggttatgaaatgtaagaaactaatctgaagggggtcccaggaacttaaccaaattcctaaactggaactcagccttgtaaagtggaaaattatcaacgctgactcaggcttcactagcctgaactttcatctgtaacttgctctgactcttaatttgtacgaaatgcatcgattttaatttcttttactctagaatttgagtactgggattttaagaatccacccacccttatttacacagcctttatcgatcgtctcgtttcacctctttatttacagttcttccgcatcctttccatccgtccctgggaggattcatgtgattagagcaatgtgcagatctgttgtgcctcttctgcttcctctttccttttcgctgctcgacggccaaccgagtcatggactacctccgtttcaggttataagactttctagcattgcccacaatcatatagatgttaatgaatccaggcacacatatatgtctagattcattaacatatatatgaatgtgggcaatgctagaaagtcttataatatgaaacggaggaagtagcttactgacatgggaggtaccaggagataggaaagcccagaaaagtcgcccctaagcagcttgaaatgctactgaagccgtcaagtacaaggtggtagctttgagactttgatgttctgggtgttcctcttcgacctttgggcgtgttttgattccacagcctccacagcaccgggtttctcgatcagcttaaattgctccagaattcgttcccctgtctcagcttggacatcatcaaggttatgatgttggttgaagcatccggaagatgaaaatcccaatcttgcacagctccaattctgttgacctcagttttgtcaattctaatttagagagcattttgacaagcctgtgaggcctgcatgaatccatgggccttctgatttgccctcatgccattctttaatcttatccgcaattaaattccagatgaacaaatagagaagataaaatgctgctgacctcaaagtattgcacctctgaatcccttgcttttccagctgcccacctctccaggtcatcaatgtcaggttgttccactaggaagatatcactcttaacaattgatctaggtcttaatatttttcttagataatgaatttttcattaatcaggtctctatatgtacaaagaatatacaaagaggaataaaaaaaattaaaaaaagacttcatcgacaacttattcttttcatcgcagcgtgagaggatggaagaggagaaacagaactagtccatgctacccgtcgccacaccatctccgcccctacgaatcacaaccaccatttgctgccaattgttacgttcgctatccgtccttgccctccaaatccccttacactgccgctgcattgcgaatgcccctagcgcgccgtgaagttgctctgtcgcaccaccaccatcttccgcaaaacatcaaactccccgccactcctaaagcgacacggagccgtctagcacgacatgcacctgcctttacagatgtgatgatctcaccggagatactcaactgcaccgtccacacctatccgtagctaggccttgccatcgacgctctatttgcagctgccgcctctaggatcactacaagaatctatttaatctatgacaaaaaaaattcgtcatggatcactgaaaattcgtcatagaatttgtctatgacgattttacttatcgtcatctattgagcgtcacagaataaatatgtcgacgttttccctaaaatcgtcacggatcagcacaatctatgacgtttcttaaccgtcatgaaacgcttttgggctcacgtagtccagccaaggcccaaccttcgtgacgaaatttaatgtcacagatggctaccacgtggcggccaacatggcaggtgacgtggtcgttgacacgtgtgtgatgacgtggcactaacgacgtcagcaaacttttttatacggcccattatttttttaacagcctattatttttttgacggcccattaattttaaaatagcggccaattaattttttatattggtccattaattatttaatgaggcccgttattttttttagaactggctcatgttaaagtagactcatttcagaactaggctcatttcaaaccagacccatttcatcaaccaaccatcatatcaaagcccaccaaacaggcccattacatattagtgcccacaaaattcaataaaaaaataaaaaactaaaaaaagctgaaaccctagccggccgccgcccgcgccgattccgcgccaccgcagccggcagccggacgcgccacatccacccgttacggtgcccgacgccagatccgccatcgaggcccgcgctgctgtcgccccgtcgtcgccagctcgcccccgacgccagatccgccgccgccaccgctttgccgctcccgagcagtcgccgccgttcccgccatcaccgtcgcccgccccgaccggatccgtgaagtcccggcctctcccgagccagccgccgccgctcccgccgtcgacgtcggcgtggtcgcccgcggcgaatagagaggaggcatggacacccacggtggcgagggaggagccgtggacacccacagctgcgaaggcgggggcgaggacgcccgcggcggcgacgttgtcccggcgcccgctccagctcccggaggccatggcggcggcgccgcccgctcccagcctgatccgcgagtcccgacctctcccgagccagccggcgccgctctcgctgtcgccatcgcccgccacggccgaatctacgagccccggcctctcccgagccagctgccgccgctcccatcgtcatcgtcgccgtcgacatcggtgtggtcacccgtggcgacgagggaggaggcgtggacacttgcagtggcgagggaggaggtgtggacgcccacggctgcgaaggcagcgccgaggacgctcgcggcgtcgtccgcggcggcgaggttgtccccgcgcccgttcccgctcccagaggccatggcggtggcggtgcccgctcacggccggatccgagtgtcccagtctctcccgagccagccactgccgctcccgccgtcaacgtcgccgtcgacgtcggcatggtcgcctgcggcggcgagggaggaggcgtggacacccgcggctgcgaaggcggtggcgaggtcgtcccggcgcccactcccgctcccagaggccgtggcggcggcggcgcccactcccagcccctcttcgtcggccgcgccacctgcatggcgagagagagagggagaggagagaagggagagagatagagttgaataggggaaaatatctgtggtgggagagagaagataggagaagtttgaaaaattttgaaatggtgaggagggaaaaaccactaaataaattttgaatcaaaatttatgatattaaataaactcatatgaaaaagttatcaaaaacgaagttttagaactcattgatatctaccaatttgcttttggtcatttctccatccgagttagtttgaactacgtaaaatttgaaatttaaaatataagcaattcaaattatttttcaggtactaaatgacttcaaatgggaaagttgtcaacaacaaagttgtataacttaacaagatctacaacttttgttttggtcattttgctatatgactttgtttcaataatttgaatttgaatttcaaattatgacaactttaaacaacattttcaaacattaaatgatttcaacagaaaaagtcatcaacaacaaagttatataaaccatcaatatatacaacttttgttttgttcattttgctatatgactctgttgcaataatttgaatttgcatttcaaattatgacaacttcgaacaacattttcaggtactaaatggtttcaactgaaaaagtcatcagcaacaaagttgtataaatcatcaatatctacaagttttattttgttcattttggtatatgactttgtttcaataatttgaatttgaatttcaaattatgacaagttcaaacaatattttcaaataataaatgatttcagctgaaaaaatcatcaacatcaaagttttataactcatcaatatctataacttttattttggtcatttcttcatccaataaagtgatagtaaattgttcacaaaatttacatatctcttatatgattttgaagtatttaaatcgcgacaaaattactataacgtcacaggttttgggccggtttatgacgaaatcgataaacgatcatggtattatgggccttgtatccatagttgcatatccgtgatgatctctaaaaacatcacgaaaatttcatcaaatttcgtcacagattaaatagattcttgtagtggatgccgctgttgttttcatctacgttttcgtcttcctacacatcaactgacatgccgtcgcagggaaagggctagcccccaccacgctatcggaccgtcgacagtgacagaggaaggacggaggaatagcgccatctccactcaatgctgacaacaccgactagagccccgcccatccaaaaccctcgccgtccgttggcaccgctgccgccacctccatcgacggtaaggatggcaacgggtcgggttgggcacgggtagagcgattccatgcccgacccgagacccacgtgcccgtgcccgacccatgcccgcaaggtctatcgggcaaaatcctatgcccgtgcgcatgcccgtcgggcacgggcatgctcgatgggtacctatcaggcctgcctacgccgtgcgccaccaccgccgtcgtgcgatgccgccaccgtcgtgcgtcgccgccaacgccgtcgtgcgtcaccgcctgagccgtgcgccgtgcgatgccgcctgctcctgtgcgccgccgccagccgtgcagacgccacagacgccagccgctagcccgcgccgccaccgccaccagccgtcgtggagattgggggtaggagaagggggtggggattaggttagggtttggtgagagtatatatatgtccctggttagtgggccaaatgggctaaaagaaaagggtatgaggaataagagatgggccaaaattagcaaatacatatgtacgggtcggacatgggttatccgtgggcaaaaaacaatacccggctgctacccgctatgttctcgggtctcaggcgggcatgcccacgggtaaaatattacacccatgcccacccatgcccatcgggccggatatccgcggatatccggacctgtgggtaaaattgccatccctaatcgacggtcgatcagagatgatatatttagtgaatactagctgcgttacattggagtcatccaatcaaaccaacatcaatatatactaatcaatactccacatctagtacattcatatatttaggcatgtctagatctcacctaaaaattttacatcatattacatcgaacgtttaaacatttgcatgaagtattaaatataagctaaaaaaataactaattgtatagattgtaactactttgcgagatgaatcttttaagcctaattgctccataatttgacaatgtggtgctccagtaaacatgtcctaatgacggattaattaggcttaataaattcgtctcgcggtttactgacaaatactgtaattagtttttttattagcgcccgaataccccatgcaacactctatataatacccgatgtgacacgccaaaactttacacccctagatgtaaacacccttagctaggcatatatgcatatattttcttaaattagtcgttgattgatcaacgcgtttaagcaagcattcgtatgaacacgaataattaaggacgacaggtttgttgccgctagtgtgaaaatcaaagtaatttcgtcctagtttactttatttttgtatttttatactctacaaaccaacatctcttgcatgagtcgggagtgctagtgacaacgacgatcgaccatatatgcatcaatcagaaaattcagaatagtcctcatcatgtcattcagaatggtcgtcatcatgtcaactaacaagtttgatgttgctggtgtacacatgtgtgatactaaattcttctagaaactggaaattaggcatcaaccgaacaactccttagttccacgtacacatacatgcatgaattatggatggacaaatcaaattcccagcatacgtaaaggaacagcagtcccatgcgacttcgcataattaatttaattactctccaatattaattcttaacgactaagaaacacatgtatgaacaactaattcaattagccatcctgacgaacaagtttccaagcacattggtgtcgattcgcgttgaataaactacgtatatactagcacgtaagcaagatgaaacatacatatacagtatgatcataagccggtatgatgcctaattgcaatcatcatcacctgaaagatcatacagattatgaatcatgtgcatgatgatagactaattacctgtacagtcaatcactgggttcactagtaacccattaacctttgggagtaaattagtggcgccaccacagtaatctgggtttccaatccaccgttaacgtgtggtgtaaaattgggcgagttcacacgctacgacattacacgtcctaggacaataggaaaccttagcatcaataaagaattacaaatgaagatgaaactggcttgtctgacagagatcaaagactgtacttaacagcgccatcttaagcaaagatgaatcgctaatattaacctattctatacactgccaaatgtggcactatgctatggactacctatatatacatggtgcactaacctcttttctgtggtctacactagagccttgttccaggcattcctcagtcatacaggtgcatatatgggctaactatacgctattattgtaagttataaataggtgaaaagaaaacgatgaagtagtcatggcttccggagagctgacgcagctcccattattacagccattacaaccccgagtccggcaccaagtgatgcacctacggcagcagctgtaacagagccatctctcttctggggcttccgcttcccttgcagagatgctgctttctctctctccagctccagcgacaatctctcacgagaaagctcctatgcaagcatgcagtatccagtcagctatgtgacaattgtttttttttttttttgcggggagctatgtgacaattgttgaaagggcatacattggatagtttgtcaaaaggtatgctatggcaagctgacattcttttggattttaacctaaaactattgtctcatgaggtacataatcaaacatgaaaatttatgtaaggcctctacaaatacatggatttatgcttcctttgccttctgaaaattaagagtaaagtccatcaccggtccctaatcttgtaccgttgtgtcatcccggtccctaaactcgcaaatcgaccgttcaagtcctcaaacttgttcgactgtgtcatcccggtccctaaacttacagattactcgtttaggtcctccaacttgttcagttgtatcacctcgatccctaaacaggacggtctaaaaactttatatcaaaaaataattcataactttttcatgtgaactctaatgaagacaaactttatatcaaacttgtagccctcgacgcgatctacaactttgtagttgaaaagtttatgaattaaaactgtttagggtcccaaaatattgttgcatgtttatagattttgaaattttaatattaaaattacattttgggacaaaaaatgattttaaataaaaaaaattcaactacaaagttgtagttcgcgtcgagggctacaattttgatataaagtttgtcttcattagagttcacatggaaaagttatgaattattttttgatataaagtttttagaccgtcctgtttagggaccgaggtgatacaactcaacaagttggaggagctaaacgagtgatctgcaagtttagagaccgggatgacacagtcaaacaagtttgaggacctgaacggtcgatttgcgagtttagggacagggatgacacaacggtacaagtttagggaccggtgatggactgtacttgaaacttaatgtagaaggaaagagagaagtacctcaaatgctggctcttcattgctgtgaattacttgatgtacaagttgacgaagggcagtgacaccctcaacatgcataacaatgtccttcctctgaaatggtgagagtgaaaagtttactggataaaaagcagctctgcctgaaggattctcgttcctcagactgccactagctgaactgatggggcgcaaactatttgtggcacttggcattagaaatggggaagagttaacaactttagtcatgtcaggagaggcttgataagcttccattgctgaagtgatcaatgcgttctgttcatgtgcactgacggagaatttattagttattgcaaggatccatggaatgccaagagccttggcttcatccaagagaagtgaaagcgctggctgtggttgagaagtgttggactggtgatactgaggaattcgatgagcaaggttatgcacaacaataactaagtcagtcttcctgctgagatcatgtatccctaactgcaattcttctttgaactgcctaacttctaaaggtagttcctgttagaacaaaaacatactatgagcattttcggggttgaataatcagggaaggaaccacattgctatatatgccctgtaaaaatgaataggtaaatttttggtccaggaattatggttggggagaccaattttcaccctgaaaaaaaaaagaagctgcttttcaccccctacatctaaatcttggcaatcaacacaccccatactcaatttcacaatgtttttggatggcatggtggttttcacagacatgaacttccattaggcaagttcagttgagttggctgacattttgatgattccacttacacctcaaaaaaactttctgaatagaaaatgtcagcaaaaatatactcgtttctaaaataatttattggataaaaactacgaactaattgtttcagataactgctagggtgatatatctataaacatatataagcttgtacagtcattaagtaactgatatacaatcattaggcctactgaagtaccatatttgttattggatataatggaaaagggcaacattttttttctatatagtttgaaaactgtcaatggagttaatttcatggtaaaaaaatgtacctgcaagttcactgttgccgaatctacgtagcacaaaccatttgaaactccttttccatgcaaatctacatgtatgcactcaagaactgctttgcttctttctttaaattgtcctaacaatgcttttagcaaggaagttttacctgctccctacacgaaataaatacatacccaatttagtattcccgtggaaaaaaaaagaaaaatattcaagatatgggggtacctctagtccaagcaatcgcaccctcctggtcctcacatagacctctttacatatagttacaaaatcacttgtaccgtatataagaaattcattcaaacccttgcaacaacctttatcttcaaacaatgagtcaaatccataatctggatttgaccctgtacccgtggccacagaaaccataaaatcttcactgatataatttggaggctgctttagtggctgaccaactagaatgcgcattttttgcaatgtaggctgcacttcctgatctgatgaatatgacaccattggtagagtttcaatgactgttgaatacctgcacatgttgaattgtaagatggaatactagcaaataaaatggagggaactttgctagccataagtaaaaacaaaagagcaatattcatcaaatacaacatgcaaacatggaacatgttttttaagaatatattattctagctggagttctccaagataaatccagttcatgttccgggtgtacttatatgggttcaaaaatcaaaattcacagactctcaaatatcaacactacatccataccaaacatgttcaaatataacagatctttcgtctattgtgtatatgtggatgctaaggcatacccaaatgaaaagaatacgaaaggtaccctcatatcttgacctattttgtggttaatgcatcatgccaacaagataagttactcgtatatgataattgatatacatatttttttgaatggcatatcttgtgaagttgtgatattattggcatgagtgtttttttttttttgggggggggatttgaggttacttttggatgatatatatcttgtgagtttgccgcaaattcatagtgagtatagtgttagattgatagaaactgcaacgtttcataggttgtagtagagtggaattatgtagactccctgaacccttacatgtaggtactgtaaatccgtaacagcaacctggcccatcagacaccatatgagggatattaaaatcaataaaggaagagccttctttattctttacttggtgcctgatgaaacaattgccttggaatatggtggctagctaatcaactaaccaaaactccaaaagataaacaacagactgatttaaggtagcctaataagtgaagtcagatccagctgcctaatctgttgcagctgttgctccttgtgctggttgtgtcttgtcgtaggtgatccccaaaataacatatattccttttactgtttggtgctaggaaaaactgttttgttcttgtcctacagctggtttaataggtataaaatgtggctcattgtgttcacaagggttcctgtttatcaggaaaagcctcaagagaaaaatgtgacacatagtgttaatttgtattcttaccattccttcttttttttcacatgcatcacataaattttgcacattagcatagtagtacctcattctagtaccagtttcctaaaatttgcgcctacagaattatgaacatggtattcttgccgagatgaagattggtgcctcaaagggcaagatcaaatatttcaaaaaaaaaaaagaaaaaaggtgtcaagaaaagcttatagtgcaaactaaagcataggcctacaatagattatgtcaaatttggtgagctttccttctgtagtgtaggactcaaaacttgtttacaagagctaaagcataccagtttccatttatctgagcctggaaaagagtgcacatatgcaggtcatgtccaattatatcaactttcaggggttcagcacttttatcaccagggtagccattccatccaagaggaagaatagaagtggcagttcgaatagtaggaggctccacaatatggccaagttcaacagaatcagcagctgttagaccgagtagttcttgtagatgtgaaaattgtggcaattgttcaatgcctgtaaaaagctgggcatttgcagacatgcagatgtcatatattctgcacaaataggacaaaaacattcaatggtaataagtccttttcccccaaaaaaaaacatgtgcaatttaaactggataaattaatctaatgcaacagagttatattgtgtatgccaagcgtcatgtcggtttagtatgcctttcttgtttcaatttaatgaactaacaagagacatgtatgcacaatatgcacattcacagttccatatagaagatcacttctcaatattgtgctatgcagaaaaagttcattgttctcagagcttctgcactattaaaataagttaatgaactatttataaaagccatgttatataggcagacatggataggtgcactaggaacaaaaggtccaataggcatacacttctaacaattatacttctacactgagcagaaccatggatacttaatataaccctatatggcaaactaatgttcggagaaagcatttaccacagcaaacaatccatatttcctttgtttttgttcatcatacttaggtttgatgcatgagccacacaaggtttaaagttggctgactagttagaaaagaacattatttattaatagccatgtgtaactaaaggtgaaagttgatcttacttctggaagcgagccctataagatttcattgagtgtgattgcaaacgctctcttaattccgttataactgactgcacctgcaaatgcctttgccagaacacagcaagataatgagtatatccaatattattaaacagtcaaaacaaaagaaaacaaatcatgttcctaaatagttcagatttttttaacaaatacaagaggattaggaatgaactaaaaagctcaccgatgtcatcttggagtactctgaatctgaaagtgtattgactgatgaatctcccaacaggtatagctggtaagcatgaaaacttttcttagtgttaacagatggaactccactccatttattaaaaagaatagattgtttaatacatcgctaatgattttctctaatcttattattgcttgctttctcaaggtagtatgatatatcatacacatcaggtaaatgacagacaatagcagcataaaaattatggaacagctatgttactgcagaagtcatatttaaagtagcaagatcataaactggaacaaacatacacagaatacaagtaatattcttgtaaccaagtctacacaaaatacaggaaatatgacttcaagcatcgaaaagttttcatgcaaaagatgacttgtccacatgtatagatatgctccacacaaatggggatatgcattatgcaaatactaattggtagagtttgaaacataaaggcttaaagggttagaagatatgataccaaaaaggaactaaaaataggtgccaacaaatggagtaaataataaataaataattactaacctcaccaaatggaacatatgaaggcaaagaaggtactctgttccaccgttttgaacccccaacttcagaaacattagttttatcagtcttgttattttcttcagtgagccctccatctttatcagataaaggggtaagagcaattccttctgaaccttcttgaatctcaagagattgcagcccctcttctgattcatcaacctttgattgcaagaaattatccaactgtgatggtgcctttccaaaactatttgtttgtttctgaagcacacttaaactttttcgcactccttccaaaggaacaagctttgaaagtctccagagtgacttttgaacaggaccaacacctagaacaagttgctccccattgttctcttttgaacatacagattttgtgtccttttcttcatcagattttgcgttagtgttatcaggtgtttgggcattatagtggtgaaagtatgccggcgataaaatacgtggcaccaagtcctctggaatacagtaggatttgaaataatcttgccatcctcttcgatgaacgtagctagtaaaaggaaaaagggaaaagataaagaagtgtttccaattttatcaactctctaacacatatctgaagaaatatacaattatattaatttaattaaaaattaattgaaattacaacaaaccacgcagggtattaggcatatttgaaattacaagaagccatatggagtcttcagacaaacttactctctcagtgcagcattcccaactggtggctgagaaaacgtgatacacttcacctgaagcctgtcaggctctttagatggagatgaggatgcaagtactcttaatattgcaagggtagccaaagcagctacctgtagcataatttgaggtgtataagcaaatagaaagggtgagatgctatgctgcaagttacacatgcctacataccgctccaccaagcgaatgtccgcacagaacaagtttcctgttctttttctgagcaagtttgtatagctccagagcaggaattccattggcacgtgctaagaaaccctacatgttatactgacttaggtagatccaagcaatgataaatcaattctaagaaactaataagtaataacagtgagccaatgttcaacaaatagttgcatttattgcgtacccggtgtgcagcaggttttgattttctcaactgttttgatttctctcgataagatgtcccgaggttttcttcacccttctggtcatcattttgcacacactcaacagcatcagccaaatcctgtgcggtatcctcatgaaatacggttccttggagtatattcacatcagcaataatatctctataaaggagagcataagaaaacttaatgaaattgcaaatatgataaacatttcatactttaggatcgcaagaaattcttacttgtattgttttgtaccgataaatgtagcaaataatgtatcaccagcctctgctaacacatacctacaggatttcaccaataaaaaaagacaatataatgaggagattttcaatacttaaccatgaaagcatagtctgaacagtgcactttttcgtgaatttcacataattatgactttactgccaaaactacaaaaacctgaaactttttgtttcacatttcacgacactacagctttttgaaagatatttatcaaaacctacaactctgttcaactgttgcttctgggttatctgacaggtaaggtcccacctgtgccctgtcaacttcacagcagctaatgggagggaaggatgtgaggatgatgagtgggtctaccaatcagctaatgggggagacaacataattacatgttttttataattattcctcttaaagttgtagttttatgaaatgggataataaagctgtagttttattaaatttactcttttttatagtttttatttaaagaaaaatcttaggcttatctccatggtaatggctgggtgggatggataatattccctagtgaatgcaccagttcatgctgttgaaccatttatgcaggtcatcatcaattcttatgtatcttttttaataggtgaaattcttgttggaacttggaagttgatacagagatggacatgagggtggatggcatgggaggtgatgttggacaagaaactacatggccaaagcttgtgtgacttgccgatagagcatgagaaaaggaattagttgatactgttacagcatttgtgagaaaatatcagcaagagaatacatatattataaatatgtctgtgttctagaatgaatatgcttaaaccttacctatgtcctacatgatccaaggatggctgaacacgctcaagagacacaatgtgtccaccaaaatcagatttgaacttattaatatatctcatcatctcagaaacaggcctctggcacaaaaaaaaaaaggagactaagtaaaaataaaataaacaggcctcttgcagagagaataagtaaaaatattctagatagtaattttctgatttataggggaagaggtgaaggtagtcaaaacacattaaaaagcatggaagagtaggttaactgaatctaaacggttacatgaaaattggaacaacgaaaatgcacttattatgaaaaatcacagtagtttctcttaggttggtcattccttttcatggttccaacgtaatgtcatatgaatagaataacacaaatagagatatagttcgattgaacgtacatgaatgaataaatgattatacaatagaaggtgcttgcagattaactacatcaagcaggcaccacagagacgttgctgtttttattctacttagaatgccacaataacattataacggcacatggttgtccccagtctgaggggcttacatttgctagaagtttttcgtgatcgtttagacatttcccaggtcgattcaacatcactagagactgccaatttttacatgaaactactggacagaacgttccagttttttactcctacggcaacataagagctactatatgatcgatccctttggccatcaatcagagttcaccacagccgcgcatgtccaggtctctacctataagccaacggaaccggatcgaccagaatcgcgaaaggcgggggggcggcatgggcggaagggggttcggattaggtcaccttgtagacgcactcggcgaggacgacggcgcagagcagctcctggagctcggcgacggtgtcgacgcggacggcgcggcagagctcgcggagctggcggcggcggcgctcgaactcctcccggaacgcgcgctcccgctggcgcctccggtcgcccggccacgcgggcgcccggggcggcgggggccaggaccaggaccagggccagggccagggccaccgcggcaccgccgccgctgcggcggagggcggcctcggccgcgcccacgcgggcagccgcgccgcctggtcccgcgcccacgactcgacgcggctcgccagcgccgtcgccattgtcgtggcggggcggggcgaggaggaggagagcgcgatctggtggcggagggagggagaggggggaggaggaaggggaagtgtgtaggattggtatattattatgccgccgcggcgggtagatccgttcgttttcgttgcgtctcgtctcgtctcgtctgcgggctgattggaacatgagagttatgatgatgattttatgaaagtagaaacgatatcttttccgaatataactgtattccgaccatcctattcttcctaaaagaatcaacctagctagtttaatgcatatgaacacaaagaggtgtccacatacattattctagaaggggtcacattcttaattctttttgggacaaaaagagtatttcagtttatagaattttaaatgtccttgttaaaataaaatatagttgtaatgtaaatataatcaaaatcacgcagcatctagtttcgcgtgcttacaatagccgggtcgcgagtacagccacacacaaataaattttaaaagcattcatattttatatggtcaaagttacataaacccatatatatattgacttgtgatatactccattataggttttgttgcctaaatgtttgataaaacctcacttttatttaaattttaattaattttagcatatgtgaaacaatattttttaaagtagtgggaattaaactatcatttgagaactcagtaattaaaaagatcatatacactgtatcgtttaaaatttaaagtaaatttatgctcaacatgtatagggaaggggttttgtgaaactttagaaatataatatacctagggttatatgttacgagtcaaaatactagggttttataataatttaatcataaacaattagtgttttgtgaagtttatttacaaaaattctcccctgccaacacaaattttaaagcgcatccgatggcaaaaaaaaaaaacgaaagttgccctcaccaattttttttcccaagaaatctagcaaatccgtttatgaacttaggaattttatgaaaactttgtggaaattgcgcctaatccattttactataactattgacctgtttggtgaagtttaagattctgataagtaactatttggtaaccaatttttgagaatcgggaaaaactaagtgtcccagcttctggcttctaattcattttcttgattctataactacagcttctcagcatctagaccaaaagctggtctgtttgggggagcttctgattttggaaaaacctgcagcagctaggagcttccccaaacaagccctataatgccaccacattgagccatgcgattatgccatcaccaatttgttaccggttggattttatctggacgttcgatggttcatttcaagttctcagaattcattcgtttgctgcccatatttactccaaaattttcttgaaaataagcacaactcttcaggatgttcccattctccagtactgataattatttgttgtctttgacataagaaattatgcaacataatttccattaaaaaacatctattttagagtattatttaggagttcttggatcaatgcacagcacgggggtatcatctagcatgtgaaatttccatataaagtataggttctagagaagccatatattatttcaaacaatcaactgttggttttcattttgaatgaaaatcatcttaaatccacttcaggttctatgtgtggacaagctagcctagtcattaacgcttttcagcttaaggtatgttggcttcaattctttcttttctcatcagcatgcttttcaaactgttaaaaagatgtatttattgtaaacattttctataggaaatttgctttttaaaataatattaatttattttttaaatatattaggtaatgcttaattaatcatgtgctaatgagtcgctctattttatatgtgtagtaaagaagatcaaacttcaatagcaacacagccttaattttatttgtatgctcaccaagatggattttcctttttctttaaaaaaataagacggatttttctcatgtcactgcaaatgtctcataaaatagaaaagaaaagagtgaaatacagtaaagtgagtattccatgggcggtggccccataggttgcttattggagtgcacatgcatctagcacttttcttttctatattttcgtttgaatttacatcagttatatttctactcgagacatgctcttgttttgctaaacaatatgctgaaaaatatactacgattatgggtcaagaatgattttaaaaaaaggaaaaacttgaaggacagataaaatgtaaaagtactaaattagcatcctattaaaagtattgtggtctctcctggtattatatgggcacaaacgcatagtccaccttttctcctctttccttctctttccctacgtcgaacttcctaatctggccgagttggcccaagctagcacaggccggcccggcccagcaacgctccgcctctccatcgagcgaggcacaacgcagctgcttctcccggccagagccagttagccacaggccagcagagccaacacgccaagctagccactgccgacgccatcactacggcctactccttccgtacgactaaaacgaacgtacgactgaatgttacatatttaaacatatatatccaaatttataatctagaatatgtcatatataatattagattggttttttatagaacagacagagtacacctcatccctctctcccggcctcctctcggctctaaaccaacagcaaacgaaatgccacaacctcaatccgctcgatgctggccaaagccgcaccaatagccgtcgccagtgttaattggccagagataaggaggttttggccaccggtaagaaactccgaaatttgccacacttgaccatccttgtccaaaattgaagccacgctcgttttctaatgtctttgtgctactagttgataacttgaaatatacacacggataataaaaaaataaatacaaattgaccattggatttttgtttctttcctgatatagattaagccagctggccgattgcatgggaggacttcatcactcccagcgtccaagtgcggaccctattgctgtacattttcctgagttgtatagcatagcgaggaacaagaatgagtcagtagcaggtgttatgagtacaagacctttaaatgtttactttcggagggctatagtgggaaagtatctaaaagattggttaaaggtagttgcagaggttattttagtaagtttaacaaatcagaacgatagcttcgtgtgggaggcacagaaaaatgggatcttttctgttaactcgatgtataaatctatcatgtatagggacgtcattccaaaaaatgatatgatctggaaactcaaggtaccgctaaaaattaaaatttttttgtggtacttaagaagtggagtgatcctaacaaaagacaatttggtcaagagaaaatggaaaggtagtgttaaatgctatttttgtgattctaatgaatcaatacaacatcttttctttgattgtcctcttgcacgatttatgtggaatgttgtcttcatttcttttggaattcatccgcctaggaatgttgctagcttattaggtaattggctaaggggggttcaacctaaactaaaaactcaagtctttggaggggtcgcagcgttgtgttgggcggtatggttgtgcagaaataatgtagtctttaatggctccaacactaatttcttgttgcaggtgattttcagggggactttttgggcaagacaatggtcttcgctgcttaaggaggaagatggccaaagagtaaaagatggttgcatgatattggagaagagagtttctagtttctttgcaatgaaagggtagaacttaagaagaagattagaagtttaatgctctctcttctttgcactatggggtttttgttgtcttaagtactattttggctaatttctgtcattgtctaagtgtctatttgtagtcactcaaatttgtgttaaaccttttgtaagggtgtgagcctaagtgctcgtgtaagagacttttaggctgtgtacatcctttgggtgtagaggccggtttaatccattatctaaaaaaaaaaccctattgctcccagcgtctttcctatttcggtaattattgttttgcatttactattaattttactttgaggttattaataaaaaaatcggtttagtggagtaactttatgatatgcttttctgaaatcggtcccaaattaaataaaataaatcaccgcatcattgcttttctttcctccaattcatggattgtactacccatttcatattataagtcatttgacttttttctagtcaaagttatttatatttaattaagtttgtaggaaaatatagtaatatttccaatacaaaacaaacattgtatcaaaatatattcaaggttaaatttaatgaaattaattttatgttatagatgttgctaattttttctttaaacttagtcaaatctaaaaaaaactttaactacgaaaaaagtcaaaatatttataatataaaacagagggagtattataaaagagcagcacagcgtccatactctacagtgaacctaaagtagtactccctccgtcccagaacatagagagttttagagttggacatggttattaagaaagtatgtagaattaaatagaaaggggttgtaattggtttagaggtggaggtagataagaaaaatgaatggtggagggttataattggttgagaatggaaagttggtgaagaagatgttaaattttggaataaattctaagtgctaaaagttgttatattttcgaacggagggagcaccttttatatatgaaaagcgatctgaatggaatcaatagctttgtcaaaagtctctcatattcctaatcaccaaaactttcctgtcggtcatcaatctcatcagctacatcccaaaggggaatcaagtgaaatgcaggtagctagctagcccgaagttatcatcaaactgatatctcctcatccgatcctcttcttgcttcacctgctgccctctgctccggtcgatcgcttgcatattgcatatttgcatgcagagctgccatgggaataccttctttctacaggtggctcgtgaacagatacccaagcatcgtctccccggcaaaggagagccgccctgcagatggcatcgtcgtctacgacaacctctacctcgacatgaatcaaatcatccattattccttccacccgcaggaccagatgaacgccggcacagatgtatgtatagcttaattagctagctactgcaaatttctaattaatctgcatatgaatctggccggtattgatatgagccacttggtcaggtgtgcgctccgacgacggtcagcgaggttttcgagtccatgttcgactacctggaccgcttgtttcgcatcgtcaggccgagaaggctcctctacttggcagtgggttcgtcgtagatgtacagcagatggatcgttggatcgattctctcgtcaaattacttagtaccatattgtcgtttcaagaattaatcatggatttgtttttgttggttggcttggcttcaattatttctgcagtttatgtacttcttttattattctctctcactgcacgctctcttttttttaaaaaaaaatggtttaattccatgtgcagatggggttgctccgtgcgccaaaatgaacggaatgcgaagaggacgacgtttcgcctgggtagccagagtcaatcctttgcatttatttattttcttgcatgtcgatcagctagctagctgctgaagcaattgatcggtcgagaaaaaggcatccatgctttggttcaattttacaggcgagtgaagaggaggaaatgcagaagatatcagaaggggtctctgaccccaatgtcatcacgccagggactgaattcatggagaagatatcgcaagcgctcacgtactacatccgtgccagattgaatagcagtgatccagggtggaaacacatcatggttaattaattttctcttgcacttcttcagtataaatgtacctcgtattctttcttaatttcccgttttttttatccaaggagagtccatgcatgttcactcaatttcaacggtttcgcatatagatggccataaggcctgcccggcacggcccggcccaggcacggcccactagccatcgggccggcatggcccggttggcacttcgtgctgggccatgctggcccatgggctgcacctcctgcccaggcacagcccaccagcagtcgggccgtgctgtgccggctcaaaggcacgggcggcccatcgtgtctttttttaaaataagtctattttctgtcccttctctttgggctgttatatatgtatagctaaaataagtctattttacgtccctattatttcgaccatggcatataatatgtctatttttactccctattctttgtgtgtcgggcctggctgctggcccatcttgccgggccggcccaatgtgccggtgggggggaggcacggcctggcggtccgtcgggccgggccgtgtcgtgcttgggctgggccaaaatgccatgccgtgggctgggccgtcgggccttatgaccatctatattctatagtttcgcatataattgctgggagtttaatgggcctctatcctcccttgctctaggagttttcatcgtttttttccttgtcctggaaatggcactttagccaatttgcgttgtttaactaaagtatttgatgtgcaattatttctgtgtgttcgcgaaaaaaaaagatgtatgtagtcgcaagatctacatgtatagtattgacaaattaactgttaatttacatgcatgcttttggttaccacaaagtacgatcttattatgctttccaatttgatgcaatacgtctattccgaaggtaatactctctgatgcaaatgttcctggagaaggagagcacaagatcatgtctttcatccgtgcacagcgcagcatggaaggctatgaccccaacacacgacactgcttgtttgggcatgtagggaaattaatataaatccgttttatgataatctcattatttcaaattaatcctagctctgtagctcagattcagttcacacccctgcctatttatttttgtaatggaagctaactgtgaacggtttattgcaggatgcggatttgatcatgcttgctttggcatctcacgaagtccacttctctattttgcgtgaggtctgatgatctcttgttaacgttaaattcgtacttaaatagataaagtgaagtattaagcatgtgaccttatttttattatatcatcatgtaacctactccctcgttccaaaagactgttattttaaatgtcaaaggcatatcaagaaagagaccaaaaagactaccatgtcctccattaacgcagagagaaaatgagaaggagctagaagggagtactattagttggatggccaaactaagaagagttaaagtggtatcaaaaggtctagtggacctcacagcttaaataaaaactctttttagataaatcctaaaactaaaattatgtttttttaaggacgtacgaattggagtaagtatgtaaagtcttaacagtcgaagtaactagttcagcatttaaaatggtgcagttaataatactcttatgttaacttcaacaggataattcccagctaacagaagcggatccagagaaacaatatctggtcgtcctcaatcccagccccagataataatgccagtaattaatcgttttggttatgtgaataacaccatcttctttcagtttttgaacatatgggttctgagagagtacttggagattgaattaaagatactggacccagtttgtgagcctgatattgagaggctgattgatgacttcatcttcatttgtttcttgatgggaaacgatttcatcccccacattccgtcgcttgagatgaaggaggtatgtgttttagagtatactccactatggattaggttcgtatagtatccggtttattacttcagatagataggattagtttccatatatatctctaggcttacttgagatctcagtcttgtactcctatatatatatatacatatatatatgtatatatacatacatatatatatacatatacatacatatatgtatatatacatatacatacatatatacatatacatacatatatatatacatatacatatatacatatacatatacatatacatatatatatatacatatacatatacatacatatatatatacatatacatatacatatacatatatatataggacacccatatgggactacatggtgcccgggctacaaggtataaaacacacaaattctctcaaatttaatttttttttcaaattgtgagtatatacctagctatatgaatttgattcatacaaatacctaacaacaaaacaactcaaactaaactttattttacaattcattattagatacctaacgaattatatgtttagatgttatatacctagaaccaaaatctaacaaaaaaaaagttcaaacttgtttgaactaacgtagtaaagaagttaatgttcatatctaaacattttaaaaaatttcatactcattcaaattgggtatatactcaatttgaatcttggagcccatactccatgtagcaccagttaatttacctatatatatatatatatatatatatatatatagacacacacaccctccctatactatttaacaatgtgcatgtgtacgccttaaacaaaagctcaagagaaagttaatcttgttattagtatttatataaatcctttcacttaatttgttcatcaccgtgaaaacttacagctgtttattaatttcatctattccatgtaacagtatgcacttgatcttctcatcgaggtatacaagacaaccttcaacaaaatgggagggtatattgtcaacatagaaaaggtacctgacggattctatgaccgttaattatttttattaatgaaagattatcctttagattatgcccgtgatgcagttacgacactgctactgaaaacaggtaaaagataaacatgctgcatatctggaagtctcaaggttggaaatattttttcatcaactgtccatgtatgaagagaaaatttttctaaaacgatacgaactggaacaggtatgttttgcattctagtatagtatatactgtcatgcaaaatggaacttattgtcattattgtcgatcgtttaatttggcctttaggaatccctgaagaagtcatgtcgcgatgtgttgcgtgaagcttcagaaagtgaaagattagagctgagccgaaaactagaggaccgcttttttaatgaagaacgtccatatgacaaagttagtgatatccagtttgataatatttctcatgcagtcccattacaatttttgacatatcgactactgaactactgcagctaagacttggattgccaggatggaagtcccggttctacagggaatatttcggtatcgaaacttctaatgaaattggaaatcttcaaaacgacatggttatgttttccctttgtttatttacttatcctaatgaatccctttttccctttccttccccttccctccgtccaacaaagattgtcgttctacttgatttagtaaaagttaaggttcaaaatgaaaatactattcgtgatgagtactccctccgtctaaaaaaaaaagataaactctagctatgtatctggacagtatcgtccagatacatagccagagtttgctatttttttttgggacggagggagtaattgggagtgggacgatgcctagggatagtatgtgaagaaatttaaatgggagttgattgataagatgggcaatatattctagtgtgacaatctttagagaaaatcttttcaaacgaagatagcatttgcctattacttcctcaatcccataatataagggattatattttatttcttgcgaaaactaaagaagtagcaaaaggacaagtcaagctacaaaatgtagtatttgggggaataaactactagaaaaatttggatataattttgaattaaatatatgatcgattgttagggctttatccaatatccaggataactaatactacattatattaaaatgtactcaattttaaaaatatcaaacatgcattttcgaaataaaaaaaatatggttgtcaaatttcacaccacattaacactacgcgggcataatccttcttggtttttccttttttttttgaccgaatgaagcatcatccttatcattataatctccccctcctcttttctttctccctttgaatttaggctcagaagtatttagaaggactttgttggatgcttcaatactatcttgcggacgtaccatcatggagctggtaagaataataaaatgttgacatatactgaataacactggatcctatttaactaattaattctcatacataaatgcttcgactctgcatcttatggtacaaacttaattgctgcaggtactacccattctatgttgctcctttcgtatctgacctcaaaagtaattgtcggttcgagatatctttcaccgtagacaaaccactgcgaccatttgatcagctcatggcagttttaccactacgaaggcatgcactttcaccattcttactgctgtactcactaccacaatacccatttttccgggcagttgggttgattatcccgtacggtcacccggcccgcctgtagctcctcatctggaaaaatcattattttcgcgtgcgggcgggccgaccgcacgggataatcgattatcccgtgcggtcgggttatatggaccgcatgggataatcgattatcccgtgcgatgcaataaaaccgaccgcacgggataataggttatcccccacagctagcatgtgctagggcgactgcacgggataattcgtgccgtcgccctagcacatgctagccgtctgggataacctattatcccatgcggtcggtataatttgaccgcacgggagaatagatgcgaaaattgaccgagctcagttacaaacatcaaattaaataaaattacatagaatatatagtgtttgtatattacaagtatcccccgcgacaaataaaccttttagtccactacatgttccctctcccactcccataggttcctgaatgtggggtccgtagcaagttcgctatgaggatcatggaactctcctagatggttactgatgtcgcgacgaatgaaccggcacaagtccgcgcacaagttgataagcgttttctgatcgaaccagcttgcgttataagggatgctcaggagctatggaaagtaaaagaaaattgatttgagttacaatcaacttaaatgaaatatgtgcaataccttaggagcatgaaaacttacatctgtaaactcagttctgtatctcccacagaccctgagcatctcgcacacgtaataaccgcataggttcgtcaagcttggttgcttataacactgcatacatatgtggatacgtcagtagtaagaagtgacaatcgtgatgtatataccgaataaatgctgacataccggccatcatccccttatgtacagtttctctctacttgtattctttacatacccgccgcgtttcttataatggctgtgtgctctacaaagataaaagtaattatttatgataaatcgacttattacaaatgatctttacgtaatgttggggggtttctttcgaacttacaagttaagcaagcataggaactccatgtacgcgtccttgtcatagtctgccggatcaagaactaggacggtttggtccgttggatagacgaggaatagtatatagtgttggctgcgaaaacagattatgaaattacgtaagatatattttcatgtgcggttattaatctatgaacggaaagatgtggaagttgcttacccaaagtgataggggatcatgatgactcatttgtcggagtgtgtgagaaatgaggtggccaagtaatttcccacatcggccatctttctcttatgcagacgttcaatgtactcttttttcttcttgggtgcttattctttagtaacgcactatcctccgatatccgcacagcgtgggccgcgttgcaaaccatcattggatttacgtaagcgattgaggcccccgttctttgagcgtctacccattgtgaccagaggaaatttgaaagttagaataactaacatttttattggcacacattgggtaataacgaactacatagaaagcttacaggcagcacgcgccgatgagattgatatctattttatccatcttaaagaatgcgtggaggtccttgaaactgatggcgaagtttgcgttaggtccatccttgaaagcgtcttccgggacatgcaccgtaatcatcccgagacctaactcacttgccctcaagtaccagtcacttagacataactcacttgccctcattgaccatggtagttcacacatcaagttgtacggcaagaacggcttgccatattcatactcatttggcacttcatcggaggtccaagattgcattttgtcagcaagacctactacgctcttctatgcgtccaaatactgatcaggttcaactggctttagcggactgcctcgacccttgaaagactgcaaaaccatccgcgtctcatactttgccattttctccttgttgtatgtggaaaccataacaggtataagcttgcgggctcataggtacttggctgctcctttgatgtatctggccggggaggtggcagatgctcctcatggggtggagcaagagacgattgccgagcaggggacggctgccgaggttggggagttaggtgcggcatgttgtggaggtggagaaggacctctaagtggtgatatttgtgggagtggagatccgggtggggtaggggagatcggaggggatggcggtgcaggaggtgcagccgtatttggcactgatggagttggggtcgtggacgtgcactgtcccgtgaggatgatgtctcgacgatgccagagtatgaactggttaaccgcatccccgagaagttcaatcccctttggtgttgggatatcaagctccaacgacatctggtcgccattaacacgtgccacctggacccttgcgtagtccgccggaattgggctattatggaactgtctacccggtatcgccaattcggacacaacctcctttgtttttcccgctctccctatcggaacgacaaggctgcatggtgtcggaccagttatactatctaccgggtaggttgtattttctaccgacccgacagagcttgggatctgcgtcgactgcgatccttgaggaaccaggtttgggaaggcttgaggatgttgtgcggcaagacagtagaactgttgggtgacttgttgtgtgacttgatctgtgatttcctggcgcatcttcaccttataggcggcacgcttcttgtaattttttgcttttgtggaaaccctgccttccaattcgtcttgcacgactgtcctctaaccctaccggagtgttatgcagttcccaaagcttcggttagctcgtcatgctgccatcgagggacaaactctccggtctgctccttctggatgatctgttgaagagacgtggtcaagttctggatgtcaagacagtccaacagcatctcaccctcttctgtcacttgctgcgatgcccacacccaatttctagttcatttatttaggggctgcaccatcaaaggtttgctttcagccacaaacttatccttcgtagcttgccatttcttctcatgaccggcgtatccacttgaccctaacctgtgtggatatatgttcttcttcgccaggtccgacatcttctttctcctatctagggcttcagacgttgtcattctggccacgaccctatcccactcgaccatcgaaatggtgccccattcttcaaatggattcttattcttctgaacataatgggtgttcatgtctgacttccactgtcgctagcgatgggaaattttttgcagtgcaaatttcctgccaagtgcctctgaccccggcggataaatgaggtgctcctgcagaccttcccacattaagttcttgacgtatatgctaatgttcttccactcatgcacgttgagaggcccatgaagtcttgccagcgtgtcgcatgcggtgctaaacttcgtcctgacatgttgcggctcgacgggtttgccatcatcgttgagagcaacaatatagtacgtctccttcggcattaggttcctgctcctctcgccactttttttctttggacgtgctccagcactcgtcgtcgtgtcagttggctgtggtttcgaggtcgcggtgtccgactcaagtttagccctgatggcatttcgtttcgaccgacgacgggtagccatctgcacagttcaatttggcagctcttttgggtgaagctcatgccttatgtccagcgattcacccaacgccagatctttctccttcaaccattcaagaaattttcgtttctgttcattacaaatccaaatggccgttcttctagggttgcgggctcttatctcgttcatgtgttcctgaatgtaccgctcgatgatggcgagctattgcaaaacgctgctatgtgcttccgctacatctttgaagtcctcatcatagaaccttttcttgcctacaatccctgtcccagctaactggccctcgtgtaaagggggggttacaccgatgtgttcagcgtccttcatataatcaatgcagcattctaccacctcctcagttgtgtacccctctatcattgatccctccggatgagctcagttatggacataccctttcaggacggacatgtacctctcgtacgcccacatctggtgcaggtataggggaccaatctcaataatctgaggtacgatgtggacaatcatatgctccatcatgttgaagtaagctggagggaaaaacatctcaagctgacaagctgtctcgattgcaaatttttaaaggggtcctaactcttcaggatcaaaaaccttctgtgatacacgattgaaaaagtagcatatcttggttatcactaactgagtgtgaactggcttgaccgctcttatagcaatcggtaggaaggctgttaacatcttgtgacagtcatgagcattgtacccagagatggttaaatctttcagagatacaagttttctgacgttcgctgagaaaccagtcgggaatttcacactatgcaagcatctacataattttttttctcttccggtattagtgagtagcaagccggaggaatatcgatcttcccatttggcagctcttttgggtgaagcaaatgccttatgtccaaattgacgaggtcagtccgggacttcaacccatctttcgtcttactcgggatgtccagtaaagtgccaatggtgctatcaaacacattcttctcaagatgcattacgtcgatggcatgacgaacctccaggtctttccagtaatccagatacctgaaaatattgagtgcttcttaaaaggcaggttactttcctctacaggtgcatcagtattttcttgatccgtccgtttcttcctcttgacgggcttcttctttggcttgtcgaacacaaccttaatgttctttgtcagctcgaagacagagccaccagttcgtgtttccggagctagatcgttctctactgtattgtcgaataatctggccttcgcacgccacctatgcctctgaggtaataaccgacgatgacgcatgtacacacccttggttgacgaggtgaggtacttgtacgacgtcttgtcgatacatatgagacatccaaacttcccttaaactagcccaagagcgaaaagtttgccagtaagtcgttgatcgtaatgaatatgatggcatgcagagtaaaatgttccctacggtactcgtcccacattcgtaacccttcctcccacagttcttgcatgtcctccatcaatggttccagaaacacatctatgttaatcccaggctatcttcgaccttgtataaggatagacaaaagaatatactttcgcttctgacaaatccatgtaggcaagttatacatggttagcagcactggccaggtgctgtgtgtgctgcttaagtcaccgaacgggttcattactgtccatgctcaatgcaaacttacatttctctggtcctttgcaaattccaggtgtagtgcatcaaagttcttccactgtcgagcatcggcggggtgtcggatcttaccgtcatttttcctaccctcctggtgccatctcatcaactcggcatcgccacggttggaatatagccgctttaggcgatctttcacaggcaggtaccacatcaccatcctagaaatgtttttgttcttaaccaccggcgcatcatctttgtcgaccacctctccatcggaggctccgttgcccgtcttgtaccgactcgtcccacatgttgggcaagagtctaagtccgcgaattccttgcggtgcaatatacaatgattttcacatgcatggatcttctaaacacctagagacaatggacatatcaatttcttcgcttcatatctgtcgtcggtaacaggttcggcttaggaagcataactctcaaaagatccatcaaatcattgaagctagtgtccggccatatccatgtctggccttcaatctaagaagttcaagcaccgagcgcagcaccgaatagtccttgtcgcatcctttcgcttcgtcgtacagaagctccttcgctgctttttccaacgcttcccaattgtctaaccctcatcttgtactagttaggacctctggttcaacgtgccgcaacatatcttccagatcaaaatcaataccttcattctctatactagagctaccgcattccgagatgtttccctgtgacatgtcttcgattataaaattttctacaccatcaaagcagaaatcatccgtcactttgttacgaccgccgacttccccttgaaaagtccatatctcgtagcccttcttaaatctttactctacgatgtgcgacaatacttcattcggattttgcagcaaaaattcgttctacaaactttgcatgggcaaaaattgctcctcaaattctccctcacagcatatgcctttgcgagctaaacgaatttggctgcttccttcaagaacgttggatgagctcttttcttgttgtacatccatgtccgatccatgacctacaataaagtttgttagtaatatatccatgcccgattcaaacacgaatgtacttaaattggagggaactaatcacatagtaaattaaagttttacagactatttaaacagccgcacaacaattttaagcattaataaaatattgtccatttctaaaaaatgaaaaaaaaatcgtcctttcatccgaatgaaaataaatttaatagaagcaaacccaacttttcaatttaggtactaaatacttttataaacatctaacggaatcattatgtatttgctaaaaaaataaaaaaaagtgcctacactactccatttataaaagtgcaagtttcttcgtattgcaccgatgaaaactgacaaaaatggaagcaaatgaaggaggagaacaacctctacaccttttatatggaactcaatcaaagatttgaggtcgaaaaccttcccccctaatttgtggaggtttaggagagagaaaatgctggaaatcctcccaacggtcgagttgggggcttatatgccccccgaccatcgcaagcggtcgccttaagtgggccgcacgggataatcgattatcccgtgtggtccgcttaaggcaaccgcacgggataatttccatcgtcggcatcacccaaaacccataatcgattatcccgtgcggtccacagcccgacaccagcattcgcctggttccaggcggagacactgggccaaaaggggccggcgtctaggaaaatcacttatgtagtagtgtactgcatgttgcttgttgggatttttatataatatatatactctccctctgccccataatataagggatttggggaggatgtgacatatcctaatataatgaatctagacaaacagtttgtccagattaattgtcctaagatgtatcatatccacctaaaatcccttatatcatgggacagatggagtaagagttaattaaccattccctctttttttcagttcgtgtgctctcccagaatgttacagaaaagtaatgggccgtaaagaatttgaccatccgaagttgcaggctgacacaattggaaaacgtttcttgtggaaagtgagcaattcgttctgttgtttatactccctctggtttttgatatataatgtcattaacttttctaagatatatttgactattcatattacttaaaaaatatataattactccctccgtcccataataaagcaacctatgaccagataggacattttatagtccaataaatctggaaatgtccagatttgttggactatgaaatgtcccatctggtcctaggttgctatattatgggatggatagagtactatttattttattttgacttcatttattattaaatattgagtaaagtccatcaccggttcctaaacttgtacagttatgtcatcccggtccctaaactcgcaaatcgaccgttcaggtcctcaaacttgttcgactgtgtcatcccggtccctaaacttatagatcacttgtttaggtcctccaacttattcagttgtgccaccccggtccctaaacttggatttgaatattatctaggtcaaataggacgttctaaagactttatatttaaaaataattcataacttttttcatgttaactctaatgaagacaaattttatatcaaaattgtagccctcgacgcgagctacaactttgtagttgaattttttttttattttaagtcattttttgtcccaagatgtaattttaaaattaaaatttcaaaatctataaacatgcaacaatattttgggatcctaaacagttttaattcaaaaacttttcaactacaaagttgtaggtcgcgtcgagggctataattttgatataaattttgtcttcattagagttcacatgaaaaagttgtgaattattttttgatataaagtttttataccgttctgtttagggaccggggtaacacaattgaacaaattggaggacctaaatgagtgatatgcaagtttagggatcgggatgacacagtcgaataagtttgtggacctgaatggtcgatttacgagtatagggaccgggatgatacagcggttcaagtttagggaccggtgatggactttatcttaaatattatttaagaattacttatattttttcgttttgtcaaaaaattgaatagagcaaccatacgttaaaagtcagcgacgttgtaaattaaaaactgaagggggtttatgcaatagatcaacgaactgaatcagctgcaagtttaggaaccgggatgacacagtcgaacaagtttgacgacctgaacggtcgatttgcgagtttagggaccggaatggcacaacggttcaagtttagggaccggtgatgaactttactctaaagatcaacatatactgctcaagtaatcaagtggccatgcactggggctaatctatattttataacatgtatatacccttgaggtgctatatttttattgatctataatcaaaacgggagtcagatgctaattttcaatgaaagaaattgtttcagtgtatctctgaggaagaactgcttcaggccaccaaagagttagataaagagctgtcggtacgtaaaaaaattgcttggctgcgttcatgttacactaatttttactgctgttgcataatcataggtagtttgcccattgccttgctataaattagatgcatgagatgagacggaatactccccggcaagagaagatctttctgcagaggaactcaaatgctcaggcacttgccaaagttattgtgcaactgcaaacatcgtcatgttcgccggagcaaaagcttccaatagattcagctataaggtacgtaatgtaaagtctgaactgaaatgaagaatttttttgaagttggtatttaattcagagcaatggtctattttcttttttcatttttaattccatatagtggacttggaggctggttatcgcctgatggcttgagcaatggtttcttttgctcacccctacaaaatctgcaggacatcacgaatgatcaggcaatgtatgtgtttcctttctggcctttcactgtaccgaatttaaatcacatctttggttgggtgtacatgtgttcagatcagcgatgttcttcaaccctgaggcagggaatccaattccaagactacttagcaatgtcaaagtacctgacaaggttggatcaatttaacttatgttactcctaacttactacgattaagttgcttattccaattaatttacattggagcccttagctcatcatcttggaattcatgggatgctgcagacggttacggaagctgacatctcaaggaggctgctctggcacacgtacccgggctcgaggccgccaccgcccatgtaattaaactaactaaactccatttctggcaccacaaattcttgcgatcgatcgatggatcggatcgccatctgtttctgatggagttgttgggcgctgcatgcagcgttgagaggccggacaccatctggaagccgatcagcaagccgtcggcgccacgggaggagcacaagaacgccggaaccgggtggatggggcgggggagagggaacgccgcccttgccgccgccgagacgacgacgcagctcctcaccgccagcagcagcagcagcagcagctacgggcatggggctgcaggcagccgcactgccgccgagacgcaacggagcagcagcagcagcagctccaggagaggttcccgtcgtgcggacatggtggcgccgcaaagccgcaacagcaggtttgatgacagcgacggcggcgcatacggtttccgaccgcttgggattgggagtgcgccgtggacaggagacggcagcggtggcggccatggccgcgggagagcgcagccacgtggttggtaggacactgggctcccggctccgggaattagagatgtacagccatactgagagacgcagaggggttttccagctatcttaataaggcagtggcctagacgacttaggtggtatttacgatatttttaagatgtacagctgtaccacctcaagactttgcaaatgtttctaaatccagtattccaggggcctcccaaatattttggctggcaaacaacttgccaattaactaggcattgtcccggggttatattttccgggtcttcacctttttcatagaaaataattttttttgctgggatgaccgaaggaggtcatccaatgtcattaagatagaggaaataagttacaaaagagttttttattgacagctggttgttgaggaagaatgtgcaccaaaagcgcacaccccgaaaccacatgccaaccgcatgaacacaatctacagagaaagaacccaagcaccgaaatagccgccgctaagcgagaccgaatgctgctaggcttacaacaaaaccataggacagaaactctaaagacgccctagggcgccgtcgccgcccttccagagaactgaacaaagttttcacctagagattcttgccaaggggtggaggggcacctcgatagtgtccctaggaaggttaccacgcccgaaggcatggccgctgtcggtccagtgaacccactgggctaggctttcgcctaggaccatcttcacccctactgccatgattcgtcgccccaaatcccaataccaccaaccagcattggtagcgcaaggccttcgccacaccagaccggcacccctccgccatccaccaacctcctcaccgaatccagccaaggagagcttgagatgaacggccccgcttggttggcccaagccatcccctgccaacaagccgcgcttccgctacctatggaactccccacagaggaggggagtttagaatcgtaaagggcctttctcaccccaaaagctatccattgaggtgaggggctctcctacttatatcttaggtccttttcccttccacaaccaatgtgtgactattcaacagggaggagctccacagatagggaaggttagccggcggacgacaaggaaggcgaaccaccacctccagacctctctgagagcccctcgccgggggactggccgggtggtcaccccggcgccgggggacagcgcagccgcctcgcaaatacgccgtccaccctaccgcctctctaccttgctctggggcgccaccaccccgtcgccgccactacagccactccttatattcgattaattctcttgattaaccatttttgaatgggcaaaaccattaggtaagagcaatgaaagcttgccaggtttcatgggaaatgcggtagcagcagagtagctcctcctagaggtctatgttacgacaggagattggaaaaaatctccccctttttttttctaagtatatgcgcagccctattgcattagggcatttatagtgcgccactggtttttggtgagcctcgtgagccagctagtctggaacaatggttagccacatctctcacaatgcaacaatacaagttacaacttcttgtgggtcccatcaaccagcttttaccatttttttctctcccctcactctcctgccttctttccccaccgtagagcaccgagcgcatcgccatccgtggccgagcagccaagcggcgacggcgccgaccggaggcgcgaaagggcttggcgctcgccggcgcaccaccctcctctcccccctcccctccccccgaaaaaacggcgagcgccggcgcacggaagtggcggagggctcggtggcggacgagttgcggcggcggagggctcgacggcggaggactcggtggcggaggagctcgacggtggaggagctcaggggcggacaagtcgcggcggcggagggctcgacggcagaggactcggtggcggaggagctcgggggcggacgagtcgtggcggtcgatctgggacggcgccgggcggcggggcagtcaagcggcggcccgagctcctccgctcgagctgggacggcgccgggcggcgggggacgacgcgcgggagctcaacggcggatctggccttctcttcctcaggcgccaacagcaaggtgccgccgccaccgccgccatcttccttctcgctgcagcctcctcttcatccggcaccgccatcttcctctcatcggcgaccaagaggagaacgctggcggcgcgtgaagccacggagcgacgaggcgacgacctccacaacgccgcgccccgcctttctccccgtgccgcacacctcgattgaagcgaagcccgtgtgaccaattttggctccgcgcgcttcggttggctccgcggctggccgacgtgtcgtcgaatatttgcatctttggcgtgaggctgaatgacacgtccttgtgttgtgaatgcccttagcaaacaagccaataattgtgacgagagcatccagttctgtcttgcgagacatgacaaagatagctacatcgtctgcgtaaacagagaaacgataacttcccatgttttgactgacgggtgaaagaatggacatactctcagcttcttcaatcagcttctacagtggttccatttgtaacataaaaggcaacggtgagagcgggtctccttggggcacacccctcgcatgaaaagaaactattatccaggagccattcaacaagaccttggaggatgaggtccggaaaaggtttgtagtccaattcctccacctgagaccggtaccgaaattttggaagactcccaacatgtatggccatatgacacttcacactaccaaaagccttatatcaagtttaatgaataggcgaggttccttgatttccttccttatgtgcaggcttttgatcatatcctgagaaaaaaaaaagatgttatcatgaatggccctctggcacatcgcacattttttttataaccatttcatcctattagcaaaaatcttagtgattatcttagcgaagctatgcataaggtttatgaggcgaaaattatcttcttgggaagcatccccttttctttgtaggagataaaatgtggtctgagtttaggtgtgcaagtaggagaagttttgggatgggcggaaccattggatcctctttgattatatatccctgtggagaatatgggtatcgggtacctgcacagcctccatattggactagagataagaggtgggccagatccatgtattatgtaatagaggagaacttgatcgcaatgttgccttatgttctatggcaggacctagagtcctgactgtgtactaccatgtaatagattagaaaactgatgccttattcggataggttttcctctttataaccttcccccaaacctatataacgtaggcagggagccctccaagggtatagttataatcaaatcgtcggctcaatatacacctagcggaaataatcttcaaacataagtagggtatttacctatcatcgagagtgtctgaacttgtttaaatcattgtcttccacatccatccacttttaggtctcgtgcgctaccctattttattattgctgatttttgtaatggacaatcccaagtttttttcttttgtaaaatgctcccacacatccatctgcccatggagccttttctgatggtagaacgaaaattatcttctttacttcttcagaaatatgttcctcttggtctgaattaagagcaaggtttgacaagttgcccaggaaagaagacaagttctttgtgctggtaatcccaatctctgtaagaaaaagtccctcttctttctctttggtcgttaattactgccaaacctgtaattttttctgtgaatggaatattttctctgtcctgaatgaactatatatgttacgttgaactttgttcatgtccaaaacctaattaatctatgtcatgatcttatcaatgttcatgttaagagccttatcaatgttcatgtacgcagatgctaacgcgcgatcagccgcctgtgtggctgattacgtatataaaaataattttatacgtcgagattggaccctaagccgctgttcttttatgccgttttcaagatttttgtcaccgattattcgctccacgcttctaaaaatacgatttctaaaaaaaaaaaaaatcttcaagcgcaccattgagaccacttgttcaaaacggaagtatcagtgaagtttatttctcaaaatattaatttactgtgctaatcaagtaaacattctgcctcaacaatccacataaaaatatgtttcaaagagacccttagggcagatcgatcagcgcagtggtagtgatataggaatatagattttcatccctcgagacgatatcccttcattgcttacatgtaatctaaatgagaaaaactagtggacggaatcccgtggggacggaatacttgtaacgaataatcccaaaccccagatccgtttcttctccaccagatccgttcctcctcctcctttctctctgattctttctttccatcttccacctccctccctactcctcgtcggggtcggggtagggccccagcggctccgcctcctactccgcatgggcccaccgctgcacgcgccgcctctactccttctccttaccggcgtcgccgccaatggccctaggtcatgagggtctctcccggcgaagggggggggaggcggaggtggccggttgtggtggtctcgtgggcgccctggagaagcgtccggttatgggggtggtggcggaggaggaggaggaggagaagggagccaaggttgtgaagagggagaagggagcgacaacgacattggagacgaggtggccgatatggaagtaaatcattcttaactgatatcaggaggtatcacggctgatactaagtatcatgcctggtaccttagggaatcatggctgatacccacaagtatcaggcctggtaccaaggtaccaaggtctgatacctaggtaccagccgatacccaaggtaccaggtaccagccagaacactcataggtaccagatatgaggagggaggtattatggctgatacccacaagtatcaggcctggtacccaggtaccaaggtctgatacctaggtactagccggtacccaaggtaccaggtaccagacagaacactcataggtaccagatgtgaggagggaggtatcatggctgatacccacaagtatcaggcctggtacccaggtaccaaggtctgatacctagataccagccggtatctaaggtaccagatatcagccagaacacccataggtaccaggtgtgaggagggagcgcatgccatcatcatcgtgcccggccaatgaacctcttgctgccatatgtcctctcattccttcccctcctcaacgtgcttcctccctttcattctgttgatctggctagcaagacaaggagaaaagacgtggaagctcagctatacagagaaaagaaaggggatgagtcactttaagtatcccgttctaacggtatcccgtcctctagtctctctcaatctaaatggttataaaaaatgtaaacgatatttgacatcattgattaatatcgaatatatcacttcacaaacatatacatgaacaaattcaacttctacaagttaaaaaagaagaagaataaaataaattgaaaatagttatcgtatattcgtagctatattttttaatttttattataacttgtaaactttaaattttttaacttgcatgtttatgtagtgatatactcccttcgtcccaaaatataagcatttctagctatgaatctggacacccatgtgtctagattcatagctaaaaattgctatattttggaatggaggtagtatttcgtattaatctactatatccattccaaaatatagccacttttagctatgatgcttatattttgggacggagggagtatcttattgttttgaactaaatttttattgagtattaaggtggtattctatcggggttcactctatcggtttagggttttctatcatttaccgaaatccaaaatttagttgaatttaaacaaacattatccaaattcatgaaagaattgaaaaattcaaaaatttcggccgaattaatattatatcgggggtcaccgaaatttccgaccctgggtggtatgtacgaaacaatatattcgatatttaggtggcactttcccagtgatctagcaggagtaggcgaggtaggtcttcatgttggacgtggagaacccgttgaagtctgagctgcacacggtggtgtacgcgccgacgtcgtcgaacaccagccagtccccggtgcacagctccggcagctgataacccctcaccacctcgtcgaacgagtccagcgtggggccgaacaccgtcgacgggtgcgtcttcgtcgacgtgttcgtcgacgtgatcatcatctcgccgcccatggtcgccgcctgctcgtcgccgtcgtcggcggtggcggtcaccggcgccgggcgcggcacgtagttctcgaagtgcacgcagcacagggtgccgaacatgccgtcgtcgatccagtactcgcgcacctcgccgcgcgtgcgcttcccgaagatgcgggcggcgagcgcgaacgccgtctcggcgaagtagcgccccggctcggctatcacctcgacgccgctgggcatgtcgtcgccaccgaagtgcctcgcgagggccgcgctgatcacggcgcttgcctcctggaacgtggattcgccgccgccgccgccggccttgaatcccccgccgatgtctagcacgtgcatgcgcggcatgccgagcgcggcggcggcgtcgaacgcgggccgcctcgatggcggcggcgtagatgccgacgcgggacacggcgctcccgacgtggaacgagacgccgacgacggccatcccggctcgccgcgcggcggcgaggagcggcaccacctcgtcccggtgcgcgccgtacttggttcccaagtttagcatggcgccgccgccatcgtcgccgtcgggggccttgatccgtagcagcagccggcaccccgggtggcagcgcttgatcttgccgacctcctcctcggagtcgaaggtggtgaggtcgacgccgacgccggccgcgtactccaggtggggctccagcttgcacgggttcgcgtagacgacgcggtcggccgcgacgccgagcgccagcacggcctccatctcggcgcggctggcgcagtcgaagccggcgccgagccccgcgagcgcgccgagcagcgccgggttggggttgcacttgacggcgtagtagggacgcacgccgcggagcccgcgccaccacgccgcgaacagccgcgccacctcgccgaggtcgatcacgttgaacgcgcccgccgccgcggtgcgggtcgtactgtcgggcggcggtgccgcggcgacgatggtccgcacgagtccggtaacgtctcgacggccggccgcgtctcgccggaggcggagcacctcccggtccttcaccacgggcgccgcgagcacggcggcctccatctgatatccttctgctgctgccatggatttctgcttctgtaatgtacgtacagtcacagagcgaacgagcgagcggcacaggtcctcgtcgcgagtgttctagctcgttttttaaattccacttttcaacctcctatatataggctgtgttcggttcccgggttgagaactaaccattcgcgcgcgtaaaacggagcaactcttactacacaatcaatttagtattagttttttttaatgatattctaaagcaatttttatatataaaatttttacagaagacacatcatttaatagtttgttaagcgtacgcgcgaaaaacgagagagttgagttgggaaagtgaacaaccgaactcaactataaaatacacttagaaaaaatgctcatgcgttggaacgagtgaaggctattttaatcatattattattaatttattttatctaattcggaactcttattggggtgatgggcatatatgtatgttgctttcttatgacttgacgagaattctgaagcaattaggaattcaactcttgtctcaggttagcatgcgccggttttttaaaatgatttcttatataactacttatgtatttccaaaagcgaacgtatttaaaaacagactgaaatacgaacgacgtatctaagtattagcgaaaatatcttcagtttttctaatagtagagatgagataaaattatatactcctttcttccagatagattgataaaacttgttgttttgaagagttcatggtcttaaaaaattaacttggtcattactttctattataatacacatagaaatatcaataaatacttgattttattaaaatatttttaagactaatttatacttataatctttatgtatctaagataagtattttagaaattatttattgttaaaggtttttaaaatttgacctcacatttatcaaaactgtaagtattactgtactgtactgtcaaccactggtgccgcgagcacggcggcctccgcctccatgtgatctccttctgctcccgccatggattgctgcatctgcatgtacgtacagcgagcgagcggcacagatcctcgtcgctgttttcagttttcactcacctatatataatactatagaaaagatgaattacgttgcaactagcgaagactattttaatcatattattgttatattattttttatctaaaagaatatggatttttattttgatagtattgatatctaatttggaatattattaggatgatgatcatatcctatacgttgccactactatagaaaatctcatatgtgccggttgggaaggggctatagacgcgattgatcggcacctattcccgaaattataagcgctgattttagaaccgcacttgtcggagggtggactcctccgccaaggaaccgtgaggcccccctttgtgagttcggccgggggcagcgggtgagattcgagggctcggtgaacgaagctgtgtgatcttaagggagttcaatcccccaaagacgatgggacaaaaggggtttatacaggttcgggccgctaggaagcgtaataccctactcctgtgcttggttgattgagtgtagaacaccagtgcttgaggttgcgagacccaagcgcgagttcactcggaagttcccccctccaccactaggcctagacctccttttatacctcaaggggttaccacatgggcccaacaaacctaacctagctccggtggaggagtattataatctttgaattaaatacatgtcttgtctcttgacttgggaagccaagcgcacgtcgtcttgatgatggggcctgtcaaatcttgccgcctgacacggggggtgcccctgtcagtcaccatttaatgggtgaagacttcagagctcctattacaccgggaaacaggagcattgctttgaccagagcgggaggaccgactccggctgggataagaggatgagaacatatcgcctgacacacgtgatggtgcgcctgacatgctgggtctcatcggtcattcgaccggtcacagaccggttgagtgtactgcacaccgcattaaatgtggcgtggcgcgaccgctcgggttgccataaatgcgggtaggtggacacctggaggcggacacctaacccaccgtacgtggtgacctagagagggggtcgggggagcccaacccctagtcaacggagggggcggccgccgcccgacctcgggcccgatcccacctcgggggagggccacgtggcgcctggggtagccttctccctctagtctcggccagggagtggccgctgccctacctcgggcccgacccccctcgggggagggccacatagcattggagggcagcctcctctacccagtctctagaaaggagtggccgccgccctacctcgggctcgactcccctcgggggagggccacgtggcatcgggggcagcctcctccgtttagccttttaggaaggaatggccgccaccccacctcgggcctgactcccctcgggggagggccacgtggcatcggggggcagcctcctccctctaaacctgatacccccgggcccatatcaccgacagtagcctcggcgttagccctgaccaaaaccttccccaggtggtcagggttgatgccactctcctagtctgatgatatgtgggcccggtctcttcttctttctttgctagcactaggacccatgcgcctttttcgccccagcctgagggcgactcgctagcccgtactttaggctatgaacttattttctgcatatattcagcaaatgttgttagattctctcaggcccgtgaccttacgccgcgtacctcgcttgcccttgccatttgttaacctctgttcatgttctccttcatctatttaaacgattattttcgcgtgagtgtgagtactgaactttccatagccaacaatcttcacctgtgatcaagctaagctgggcgccgtagccagccggtggggccaaagccagccgctacggaagagctagcacagggggccccgggcgttgacggtacccagagctcgacgcagggctaggatagagctaggaatcatagcccccgcactttaagcaaataatcgtttgaatggatgaagcgaatacaaactttttgttatcaagggaggcaagccagcgtgcgacacatgggtaccgcgggactgcgaggaagagatgggcgagagataaatataagcaataataattctatgcaaacgattatcttcgcgcgagtgtgaggactgaactttctatagccagcaatcttcgcctgcgatcaagcgaagctgagcgtcgtagccagccggcgaggccaaagccagccgctacggaagagctagcacagggggccccaggcgtcgacggtacccagagctcgacgcagggctaggatagagctaggaatcgtagcccccacacttatagcaaagaattgcttgtatgaatgaagcaaacacaaaccttgcttgcatgtcgcgacctttcaaacctttagctcgaagagggccccccaccatgggttccgaaccattttgggaagcctgtgaccacttagcaaacgaggtcaggttcccacgagcctgtgtccccactctacacattctgtttgctctttcctttcggtggcctccttccattatctctcccttctacacggacgagtacttttgcacgagtgtgagagccgaaaaactctagagtcagcgatccccgtctacagttgagccgggccgggcaccgtagccagccggcgggaccaaagctagccgctacggaagagccagcacaggggctcctggttttgacggcacccggagctcaacttaaggctggaatagggctagaaaacttagcccccacacttagcgaggaaacgttcatgtagatgggagagaggttgggctcttaccaccgagggagcaaacaaatgcgcaacacgcgagcgtcgcagggccatgagaaagaacggggggaaaataaatataagacttcaagctgtattaagcaggtaaattgaaaaattgaaaatacttgaagcttgaaaggacgattagttgagccgggctaggcaccgtagccagccggcgggaccaaagctagccgctacggaagagccaacacagagggtcctgagcttcgacggcacccggagctcaactgcaagagtcctcccaggagtagaccgaggtaggcagcaggttcatgagccaaccccgcgcttggcccctgagggtcatggggaagaagctcgccatgacctggtcatcaccccccgccgcctctatgattgtcgtgcagatctgaagggactcgaaggggttgacgctgccgtcgtacttctcagtgaggttgggccggaactttcgaggccatcggacattccgaagacttgacacaaaaacctggccgctagcctttttcgatgaggatgtggggggcctagccccctgcctggggcggcgcgacactcctgaggaggttgcgccttctcccgcattggcgccgcgacgctcatcacgccggcgctcgaaacaaccttaaaaatcacgaatgcgccccctacctggcgcgccagatgtcggagggtagactcctccgctagggaaccgtgaggcccccctttgtgagttcggccaggggcagtgggtgagattcgagggctcggtgagagaagctatttgatcttgagggggttcaatcccccaaagacgatgggacaaaagaggtttatacaggttcgggccactaggaagcgtaataccctactcctgtgcttggttgattgagtgtagaacaccagtgcttgaggttgcgagacccaagcgcgagtttgctcggaagttcccccctcgaccactaggcctggacctccttttatacctcaaggggttaccacatgggcccaacaacctaacctagctccggtggagaagtattataatcttcgcattaaatgcatgtcttgtctcttgacttgggaagccaagcgcacgtcgtcttgatgatggggcctgtcaaatcttgccgcctgacaaggggggtgcccctatcagtcaccatttaatggatgaagacttctgggctcctattacactgggaaacgggagtcttgctttgaccagagcggaaggaccgactccggctgggataagaggatgagaacctctcaccatcattatttggtgggacatgtcgggctaaacgtcgcctgacacacgcgatggtgcgcctgacatcctgggtcccatcggtcattcgaccggtcacagaccggttgagtgcactgcacaccgcattcaatgcggcgtggcgcgaccgctcgggtcgccataaatgcgggtaggtgggcacctagaggtggacacctaaccaccgtacgtggtgacctagagagggggtcgggggaacccgacccctagtcacgggagggggcggccgcgcccgacctcgggcccgatcccacctcgggggagggccacgtggcgcctggggtagccttttccctctagtctcggccagggagtagccgccgccctacctcgggcccgacccccctcgggggagggccacgtggcattggagggcagcatcctccatctagtctatgggaaggagtggccgccgccctaccttggtctcgactcccctcgggggagggccacgtggcatcggggggcagcctcctccgtttagccttttgggaaggagtggccgccaccccacctcgggcctgactcccctcgggggagggccacgtggcatcggggggcagcctcctccctctaaacctgatacccccgggcccatatcaccgacagcacctatgaggcatatggaaaacaaaaaagaaagaaagaaaggccgccagtctccaccttgccttccgccaccccaccgcccgccatgcgtctcgcctcccgccaccgccgctgtaggccatcgtgtgcggccacttcaccaccttctccaccactactatcccagatcacatcatcaccatccaaaaatcaacaacaaactactacatatatggtacaaagtatcaagaactcaacaagctagacatagaggaggagaaaattaaaagagaagaactcaagaactcaccaccctatcggacgccacatcgcctgtgccagcctccaccaccaccaccgccaccatcgatgcgggatccggcggctgccgccgaccgccacctcgcccgggctagtctccactatcaccaccgccgccgccacatcgccgctcgtgcgccgcctccgcgtcgtacccgggctggccaccgtgtcctccgtcggccgacgctgccacctcgccacgcgtgcgccggcctccgcgtcggccaccaccacccgagcttgccgtcgcgtcctccgtcggccgccgccactcctccatcatctgccatgccgctcaacagatgaggaggcaaagggagaggaggggcaaaggaggaggaagaagaggcggaagctgtggataaggcaaagggaaggattgataaggataagggcattgtggacaaggagccgaggatgcaatatgcccccgtttttttaatagatgccagttttttttgatagagccgacacctatacttatattataggtgtcagttctagagaaaaaactggcaccaaaaaaacgacaccaaggtgaaccgacacctataatataagtataggtgtcggctctattaaaaaaaccgatacctatagtattggtaccgatttttctctagaaccgacacctatattgcttaaaggtgtcggttctatatttttttcatcgtgtggaggtgaaatgaaccggcacctataaggccggtccctatgagggattttatagtagtgtgctttcttacgagctgacgagaattctgaagcaattaggagttcgactttcgtcccaagttaccatacgagttttttaaaaggatttattataaactccttatgtatttccaaaagtgaacgaactaatttaaatctgactcaaatacagatggcgtactaacgtatcagcggaaacatgttcaattttcgtaataactagtaaaaatgtccgtgcgttgccatggataaagacaaccacgggccggtgtgttccatcaatgttgtctaacagtacatcagctggatagttgtgatcattgaagtgttaatcatttgaatggaaattagtaagacaacagaaagtgcatacaaacattatcaaaacataataatgcatagattgcaaatttgaggtgtgctatctctgactatccgatcctaattaatattggtcacatatcctgagatacaacccaaaaataccaaataccagggattttactgtcagctaaattaatttcatccaacaaggaggaatttacagaaaggaaagattaatatacatgtaggatgaataatatgaaaatcacctgtgttcatcttttcatgacgggctctctgaaattcattgaattaaccactacagaaatctagataggtgccggttaggaacctgacatagttgtaggatttcccaactgacatctagaagaaggcagcatagatgaaagaaatcaaaggtgccggttttggtattgacaggtcccaaaatttttttaaaaaagtggctcaagcgaatgcatcgagcagccctacttcaccctgattcaatagaacatttaattcatagaagtaatcgggatccaagaactcaagaacataacatcaacactaacagatagaacgggtcgacgttagggacggcaccaccgctgccgggtggggacgggatggctcctacggaggtgggaaaattctatatgtgctagttttactactttcggcacttataataccgacctctgtatgcctttctgtatcgaaaaaaattattttttgcgtgctttaactgaagatataagaggattcgtcaggactagacaaacaatagaatgagataatttctcaacacagggttaacgaataaattgaatgaacaggaagactgtacaaacaaccctgatatggttttttttttcaccatacatagcatgcacccattcggaccaaaataattttggtagataagtagtaatctcagtcataaacaggcagtccccaaaatttaggcttaacttcagtttcaatggcacatcactactagaaaaagcatttttcccatagtaggggtctcattttcgcaggcggacatgactcttaaagccaaatgaccgtcaccaaaaatataaatcggggtgaaatggtcggaccacctgcgaaaatagacttaaatataaatagacatgggtaggggttgattttttctaagtctccacccacggccggcctctcccctccccacacctcatgcctcctcctctcccctcacgccgcctcctctcccctcccctcacccctcctcctctccccggccgccgaagggggagcgacggcggccacggcatggggtggtgtgaaaggcagcggggtggcacggcgtacggttggcggctcccctcccacctccctcctagatctagccggaggagggagggggaggccggtggcggcgaatatggcgctgggcggcggcggcgacaacgacgacgacgcgcagggcggcggctcccctcccctccccttccagatccggccggaggagggcggcggcggtgaggcatgtggcggcgtcggcgagccgccgctgtgattctttttgttcatttcatggattttcgcaggcgggctgttgccccgactgcgaaaattgttgattttcaccgtcgttgtgctaaaagcggtccaacccttcacctgcaaaaatcacttttgtccgcctgcgaaaatattttttctagtagtgcatccaatatgcttcatcgattcttttatcggaattaaagcacttaatggtagcgtggtattggctgctgcagaatgctttctcatctctcaaaaacaaacaatagtgcctatggaatagacagaactcaccaaactaatcaatcggagcgtgggatgacggacgaaaaaaaaagtatagaatcaccttcaacttttataataaataaagataaagatatagatgggataaaattatatactcattttttccatattgatgatacttgtttgaaaaaaaggacactgtcttaaaaaaataactttgattattattttctattataatttatataaaaatatcaataaatatacgattttattaaagtatttttagactaatttatacttatgatcttcatatttctaacataaatattttagaaattattcgtaattaaaagtttttaaaatttgacctcacatttatcaaaacgataagtattactatcaaccaggagtatataggggaaacatatatatgctttgcttagccttcatgagctaggttgtcagcactgtacaaggaaatgtgcagcttgtcagcattgtaccaggtaatgcgagcttgtcaaaattttctcctgctcttgcttaggaccaataatatcaatcaatacttttcttccgatccccacatgaatagtgcaggggacagtagctagttgtccatactagtctactaatcacatgtccatacgttccaaacagaagaagagggaacatggtttaattttggttttttttttcacccgtattgtttttgttttcagtctaccgtattttcgatctctttagggaaggttcattttttttttctcccagcaagcggaacttggcttaatttttttttctccagtagtcttccttttcaatcccccataaacttttttttatccctatattttttttctcttgggttttaacggtttttctttcgtgggacgtgggatggacaggaaatgaatgtttttttttctgggacgtgggatggggtgagagcgggaagtggatcggacctctttgtttttaaagtagtagagatacatatatatccggctatagtctgcatgttgttgacttctggttctatagactaggaacatattatgtacccaatagcaaatccttataacagtagtttggtacatacataaaatagaataccgcattcatcatcacagagtactataacacttagatattacaagggattgctcgagtaagtcccaaatagacttatccaactgagtgcaaaacaaaataccaaatgagacaaggtaagatagtggaagctaagctgcagtggtcctgcttttgtccatagacatcaaatgggaactttactcctatggcacacccttagcttccttcttcagttagtgctcatacacgtcatttgtagttatccaactctaaaaagggatatataagcaacggtgagtacataaagtactcgtaagataccactacaacatacattagtgctcataggttcaatgaaggctttagggctattttcagaaagcaaattttcaaaaatcatttcacatgtctaagatttagccattttaaccattccataaaggttgtgtccaacttgccaagctctacttggtttggtttaccttcatggtccatttcatcaatatctcatacccaaattgaactttcccgtctcttaggatagtttaacagattcaccaacccaatcaagtcaagtttaaaatttccaaatctagtcaaaattaaatagtacaagttacggtgcccctttaactgcaatcatggctattcaaatagatttgttttatgtgcacactacaatggatgcatgcttacctgtaatccatgaatagccgtgaaaagcttcattttattctacttgtcattaacaccacactctaccctctttattcaaacacataggaccacagcgatcagaacgtactggacatgaccggtgtgctgcctcactagaatcacctcattcactaggtctaatctcatacgaaaaaatggtcgtactcatattcgtttcctatctattttcttgactagtccttaaaatagggtcaacaataaccattttgtgactactacataattgattttttctagacgagatctcctttaggttgcaggcagatcataactacttccgcctgcaaaaatcaatctcccatgcacagttcaagaacgccatgcgaaaatatccctctcccatagtcccctcccctgtccactcctcacactccctgttcaactctcccattcctctccccactctttcctgtccacacttcttggcacccctgtggcaggcttgcgttccggtggtggcagcgagctcgtgcgaggatggcgctcttaggctcaggcgacggcaggttcgggtgagagcggcggcggcgagtgtggctgagagggctcccactagcggtggtgacaggaggggtggatccggcaccccctctccctcctgcaagaatctggccaccgctccacctgattcgcatggatccatcggtggtggcaatggtagggttggatccaacgccccctatcccacccgtatggatcccaccaccctcgcgcgcgcatccactgtaggcggcgaccagaggacgaggacaacaacaacgacgccggcggcggtgatgggaggacaaagacgacgacgacagtgacggtgacgggaggacaaagacaacgacgatgacggcagcggcggcgacaggaggacaaggatgatgacgatggcgatggtggtgaagggaggattctaaggttagggtttcggggtaggtttttgatttttggtttttttttgcgattttttccttatagtagtcggatggcttaagcgtccgcatgctatttttgcacacgattgctctacccgcatgcaagaatccaattttcgcagacacctgggcgcaagcgagccacccacccgcatgcgaaaattgattatggccgcatggagaaatcgaatctgtagtagtgtctatgaaccacctaaataaatccataatgccacagtcaaaactagtttcacatgttaagtttagttttcagaaacattttcatatatatttgtatcgcaaagtggcattacatgtccccacttgctcattcataagcactctctacgtaccttggagaggaaagagagaaaggggaggagaattgagcccaagaaagagggaaaagtagacgttgcaaaaaaaaaaacttttcaatttagcaattttagtttgaaaattttgaatgttggcactggcataaaagaaataaaatccaaggaatattgggcacctgaggggaatcattctctcacaaatccctttcctatataagatataagacatacgaacatggatagagacatgggcaagcaaacaaagattcacgcgtgtaatcctgaaatttttcaatttaacatccaagaaataaaatttggaaccaacaaaaacatttccacaatttgaaaatccaaggctgtggaaaagaagtttgcatgggaaaaacccggcttctatactcggttgggcaactaagcgggctaaaggtgatgcagctaaccaaacatatgcttagtttattgtgcatccacggttaaaaaatggatagatacaactgttaacgaccaaatttggcaaatcatagatcggattcgaagttagaatcgaagaggatttggagagagtttgcttctcaaaagcagagtacgcatcggctacaaacgacatcaactgttgtctgcatcggctgacattgagtcagacaaggagaagctgatgcagccgatcccaggaatatggttctagaatcattgttgggatcgatcaaggcactacacaggcattgccacgcaaggattgagtctagaaaaggcaatcgtatcatgtgtcctaagggacttgttcgtattttaagttgtaatagagatagagttgtgtccagcaagaacatattatatattatgtattttgggtataaatatggcccgagacattgtaaacaaacaacatcagttcaataatacttccggctgcatcggtttcgatctccgacgaagaggtaaggcttgttatggcgatttgcattctcgggattagtgtttgcatattcatgacattctaatcctgcttatgtgaatcgccgagttatcatatatgctgtgtgttggtatttcttaacgacattactagaaatataattcccagcaatggcgcagaaatactcatggtatgttatggttacagagttcatccgcaagcgtacggatataccattgtagcatttcacccgagagtattccaagggtatcgtatttatttaatcccgtggaaagatcatagcagagagaaccggactaataatttatatgttacttgtaataagggcatccacaatgttgtgtaaaagtagtccataagcaatagaatattccatcagccacctattatcattgtgcaactagtccatatagaaaaaatagcaaaagatacccatatgcatatggactacccatatggaataaattatattatctatctctactcctctctcttctcctaatgatatcttgtatctatatatattgtggagattgctataaggataaactatttatgtgggtttcatttatatggatcactttgacatatacattggtgatgccctaatcatagtctaagcaggggttaagataaatcaagggtagagtgatacacaagcagggagctactcattctcatactaaaatatctaagctaagtggaaagaaaatagaaagagaatatattcctatacttatatatatatatatatatatatatatatatatatatatatatatatatatatatatatatagtatacatatattctagctatatgattaactagctaataccctttttccgatgccctgctagtacttcgagaagccactcctaactgtcgagtttcttacgacagcccgtcatgaccatacaatcggggctaaatacggaggagtacccttcccaggaaattaacttaggactatatatactgagctgtcaccatcagcagcccacctctcatccgcagcatataaccacaaataatgatatcccgtaatctagacaccaggtctaaactaccagatactactctaatatcatcgtcatgatatagagtaattgcaatagcaaacattatacccgtacctatgcatctcctagataagctagcagtataatcagtataacataaacatactataaagttggcatttatatactcagaaagtatttcaataccataaatatataaagaagagtattctaataaaagtacaaaacttacaaaagaggaaagggaagctactagagccatacctgaactctttcgaaggcttccggactccaatttctattctattcctactccactagcttaagaacactaaactaaacttgagagaatatgagagagctttgcttggagtgtgagtgaagtgaggatgagagctccttttatagcttgagaatgacggttgtggcggttggaatggtcggaaataccctccaaccgccatagggagtcaatcccagccgtccaggagaaccctggatcgaatggcgccgtggtgggtttggccgaaccatgggctgggccagcctggcccaaaatcggcaagtggcctcctctattgctcccatgcgcaaacttgtgaattttggcccagttcatcgtgtcaattctgagcccatttatacataagtctgattctcgacattatccgattgatttatcgtctgatttgatgtcgattctcctccactttatggttattctctgcaaaaggttagtaatcccaatattagtggaatattattattctaacatgaatatgcattgcaagcaaagttagttctcctctattttggtaatattgacagtcgaaactgatcactaacgaccgtcaacgctgtgtaatctagatcggtcccattgtttaactttatcgactagcctctatcatcgaaaacagctaacaaggttagacattggcgaccgaattagactgcacagcatatccaccatcttgatgaggccaccatcggcttgtttagattttgtgtttctcttcatgcttaatgctacatcggttaggttcaatctgttaagtaatgttttgaactgcactatctagcctgttttatggttgctagtagagatagtaccagagtttcaattgatcttacctggtttagttatcttgtcattcttgtgtttgcttgatatgctaaatctgccatttatattaggatcttgtttctttgaaatatattaagcctgctattggtctgttaggttgtcctgttatattgatcctcgttcagtatatttcccttatatcgatatctcagtataaagtagtatcggagtagtagccgagacatgttagggtttgctctatcggctatgctatgaatatatataatctacacttcaaagtacttttagacataagtgatttataccgcctcggtgtgctgtacgatctatcccaatcacttggttataaatgtattccgaagcatagattgtatatcattgatatcttcagacgatcgggcgggcctaactatttctataatttatctcgcattgccgatctgatacacgttacatcggctaaatattgaatgatatgtcatcagcgatccagctgatcggctgtcgtttatggatttaactttgcatcttttcctagtttcttgttggttgcaggatcaaactaattggtacgctcagaacccgaaagcaattctttagaactgcactggagctaaacagattttctaggccagtatatgtttttagcatcaacaacaaatgaaacttagattaatctaacgggccttaaaactcactagcccgtcattcctgaatcattaataactccatgccatattgatatgatgcaccttaatgtcatcggcggagccacctctcaggcagggccatctctcagacatctaggtgcagatgggtaagaccttcgcacggaaaaaaaacattttaaccacacggaaaaaagtctctcacgcaggtcgacaggctggacaaaatcttttctgtacaagtctctcacgcaggtcgacgggctgtccagcctcttccgttaacgcgtctattatggaaggtcaccaatgttcgtaaaataaaactggtaatcaccggacaacgctattagccgcctaggctcaattgtcagatccagcgctgttttgcatttgctcgaatgggcgcagcatgcgtgcgaatgcatgatcgacatctcgttgtcagcctgagacaagaagtaatccaagtacgtatcacagtagcaatactatcgtgcttatccgattactgtataatgggctcatttggaacacccacagattacggagaatccaaattgggttggctgaatgctgactagatcgatgcaatcatggagccgtccgaaaaatcccgctggcttaggaaacagctgtttggcggtccagatttttcatgctttagttttatcattgtcggcaggacgcagtcgccatcgtactccgtttgtaattatatattaaaaaaaacccaatccaacaaatgaatatggccgtagagtttgtttaaaatcattctcagaattttaattaattttcttagggagtagaggagacgaacagtgttctggccctagagcagcaaaccgatggagtccgaatgaggaggacaaatggacaatagtgcacatagcagtaccgatgtgagcccagcgatgcctgaagttctacttattatttttcatccaattttagtgggatcattagttcttgtttggtttgaagctaatttatgtcgtaccaaaattttggcatctttaatagtaccaagaatgtttggtttgttacctatttttgcccacactagttaaaattctttacactaaatttggtagtgccaaattgtggcgctagcaaaacaaaaattgggagaggactacagatcgggcacccagtttttttcccaaaatcaaatacccttccctccatgcagccagtttatcttttcctcttttgtttttttctggtaggaatttagatatctctcagcaagataaagaaatacgtactttcctgcctatgcagtattatgtatgaacaactttttgcaagattcaaatcaccttttttcctaaattatgtatctaatttataatccgattgtactattatattccttccaactaaactttaaaacaatatctcatatgattatatcctagtaagaaacatatatttttctaattgaagcatttatatattacgcatgaaacattaagttatcactactgaaacatcacacaatactcgatgaaacattttttaataataaatgtttcaggttacttctaaaatatcttaaaaaatgcagcattaaaaaatattgactgcatggcctacaaccactatatgaaacatttagtcatattgactgaatacataataaaaatcataaaatcagaaaaatatactgtttaataaagttgaattcaagttgaaacattcgtgtttttatacgtgaaacatcaaattgtagtggttgaaccatctataaattttattagaaatataaccatgaaaaatcttattacaaagatttaacagtaacgaatacagtggtgcaatcaaatcgccgattggatcagtagtttaaaagaaaaatcattttaaaagttattacccggtacaacacatgggcattttgctagtaatatacatacacggatacacaagtagaaaaacgattttggcaggcatatcactctgcatgtggatcaaatttttggccccaaacccccacctgtcatttcatcctttctatttttctttttctctattcaaatgtcaattttaaaatcaaacttccctttgaaatcctccccgttttcctctccactctcaattattcaaattcaagttctgcatcccatatcaaaatataattcaaatatcctctcccaaagttccttgaatttatgtgaattaaaatatcaagtttgaatcaaatatccatctctttcccttcctcacgaaatctcctcaaatatcaacttctaattcaaaattgttcaaacatacattttgaaaccttccttttattctctgtcactctatcaggccaaacatcacatttgaactcaaatccatattcaaaatccattgaaattcgtccataacccaactctgaaaatccaaggaaaataacagattttaccattcaattgggccgtttcttcctaggccaggctaggccgccttttctcttctctcagcccaactcccacttcttccttccttcacctaaggggccccttttccccctcccagtccctcccccggcctacggagtacggactgtccatatgtgtcgctctctcccgcatcgcatcaccttcccatcggcatcaatggcgccagctcggtcgccctgaatcatggagcagccctcagctcgctatcctcctcgccaattcagcattggacaaaattagatgaagaaactaaaaccataattatatgaatgaaaatccttaataataccaaaattagacatacgatggtaaaggaaataatcatggagaataataaatcggaataaataacattattactgacatgaaattaataattccacataactgagaaatttcaaaccatatttccggttggttctatttggctagaaatgactcgggaaaattaagcataagagatttacatctatcagcctcatcattttgcttagagcgagtttaatagtatagtcaactattaactccaaatcattcgtagccaatttaatagtaaattcatacaatagttatctataaacatatactatagtattaatacatgttcccacatgtcacacacacattatatttgaagtctgtgctgcagctagctcaaatatatagcttgctacttttatctctccctttttatcttcttgatatttgtttatagttggcttatagtctgttattgtacatgctcttgttcttatgtttctcagctaaattttgattttttaaccttaaatttggagttgattttgaggttttcttatcgaagtttattttttagcgttagcttttagatcgctaagaacactaatataaaagttttatttataaattatatttctcgtttgcaaatatgtcgtcagaataagccaatcgatgggggcctataatcaatattggtcaaaataaatccggttccgttaagcaagaaataatataatatgcatgataattttttatcttgtttttctcccaaattttaaatcatccaaaggtgcaacaactcattatgtaattgataaaatatttaaataggccaagaaaataatagaaaatttaatttggcccgttaattagcttagcacatccgcatttcttcaccggaaaaagtatactttgactctctcgacaatagcccgagtatgattcatatctttcaaccacacaaccggatatatcaactcctctaactgtcaaaaccgatgcaaacaatgtccttcggtggttttggctgacgtaacccctacgtggcgttcttgaccgagcttttgtcctacgtggcgcattagaataaaaaacaaaaataaaaaaaactgtgggacccatatgtcattaaaaaaaaattccaccgcatatctgcctcctgttcacgcgaacacatggcggccaggctctcatttctcctgctcctcggcctcgtcctcccggcttccggcgatgacgccgcggcgcgttcaacgtgacggagatcctcgggcggttcccagagttcggcctgtgttcagctacctgatcagcaagacgcacgtcgaccgcgacatcaacagccgcaacacggtgaccgtgctggtggacaactccgccgtggactgactcctccgccgcagccgccaggctgccgcgggcggcgctcgtcgagctcctctccgtccacgtcgtgctcgactacatcgacgccgcgaagatcgccgcgctgccgcgggggaggcccaccgtgtcgacaaccctgttccagaccaccgggaacgtgtgccgccgcaccaggtttcttgccatcaccccgacggccaagggtggcgccgtcttcacctccgccgcgctctccgcgctggtgaacgccacgctcaagagggtggtcgccgcggtgccgtacaacatcttcgtgctccatatcagcaacttcgtcgtgccgccgagtgtactcacgaggccacggccggcgctcccaccgtcaccgccgctcccgagagataagggatagagaggagaggaggaagggagagggaggatgacacgtgggtcccacaatacttttttttaatgacgtatgggtcccacgtatttttttatttttatttttattctaataccacgtaagtgccacataggacaaagactcggttaagaatgtcatgtaggcgccacgtcagccaaaaccacctctaaaaccactgacagacattatttacaccggttttaatagttgaaggagttgatatatctggtttgtggttggaggatataaatcatactcgggtgatagtttagagagtcgaagtatactttttcctttcttcacctatagcattgatgattgattagcttgcggctcaaaacttcatcataggcgcagcctttcttacggcccaacccaggcacaaaaattataggaataagttcatctgaggtcccttaattttacaccgaatccgattttcgtccttgaacgtcaaaaccagatacaactggttcccgaactgtcaaaaccagtataaatgaggtccctcggcggtttggaaggcggttttggctgacgtggctcctacgtggctagtttgactaggtctccatcccacgtggcaatgacgtggcgcttacgtggcaattatatctcagaaaaataataaataaccatgggtccacgtgtcagctacacacaaaaaataatttaaaaatggtgggacccacgtgggcccacatgtcaatgacaaaaaaaaaaatatggtggggcccacgtgggccccacatgtcattccctctcggctattccccttcttccttaacgcgtcgtcttcgggcgcttctcgcgccgcggcgccgtctcacaaccgtcgtcgtctcagtccccgctgcctccgacgacggcggcggccgaagcatgctggctaagcggcgcggcggcaggccgcgggtggagcggcagggcggagcggaggggtaggcggagcggcgacgacagcaggccgtgggcggcgaaggtggccggaggaggaggaggcagaggaggaggtcgccagctcttcttactgggagcatctcctccgaccacgtgcggcgagtagtgggagcatctcctccgaccgcgtccgaccgccgtgcaaggagccgcagaacaatttgagcaaacgagccatttccagttgatgacacgatctgcaaacagtatcatctaaaacagatattaaaacagcactaaaaacgcataaaggatcagcactggaaatttcattaaccatagtctagatcagaagatctgcacgttctttttcatccgattcttcaatttcttcagtactaagcataaacccatagcaccttaaatctcataaatccttgcctaacatcacgagagagcaagagaaaaatacaacaacaactgaatctaggtagcctaacattacgagacagcaggagcgaaatgcaacagcaactaaatctaatctaggtaggcctgtctgaactccgggcggcccagcctctacgccgcgagggggcgaaggtcggcggtgttccccacggggaggccgtggtcgtcgctcagccgctcggcctccttgtccacgccaaggccgacgaagcagtccgcggcgccggtgatgaagcggcggagggagcccgggacgtagtcggtgtggaggaacgggaagatgaggcacctgcggtcgacgcagagctgcaacagcgcgacagggttctgcgtggggctgcgcgacggtggtggactggtggcggcggccgccgtggcaggggcgcgggccgggcgaggtgacctcgatggacctcagcggctctcgctctctcttacttttctgaggtcggggcgcagggagagagagggatgcgggcgcggccgcgggtgatgacgccgaactggccgacgccgccgaggatggcgaagaagaggtcggggtcggcggagggaagaagagggagagccgagagggaatgacatgtggggcccacgtgggcccctccatatttatttttttttgtttcgctgacatgtgggcccacgtgggtcccaccatttttaatttaattttttttggtagctgacatgtggacccaccgttttttattatttttccgagatatagttgccacgtaagcgccacgtcaatgccacgtgggatggagacctagtcacgtagacgccacgtcagccaaaaccgccttccaaaccaccgagggacctcatttgcaccggttttgacagttcagggaccagttgtatctggttttggggttcaaggacgtaaatcggattctgtgtaaaattaagggacctagatgaacttattccaaaattatacggtcagaaaagctgttgtccacatgctcggcccatgaagctaatgcagtccgagtagacggccgcgggcgtcggttgcaaatgagccaaaactgatacctggtgacacctaacacctgcttctccagtgatatgggcggtgatgaccgcacgacggcggcagcgcgcacgtgagcgctcaattgatgtcgcttgtgccgttgtgcgcctattaggttaagattctcctcgacggcccgcggtggagaccatgtgctgaggcgagcctcggtccgcacgcatggccatcttatgccacgggagccataccggtgtcacaccgtacacgacacagctgaggctgggtagtgtcatatgggagttgaggcgcggaggtaagtcatgccacgcgtggcgaccggtggcgatagtctctgagtcggtaattcagcctgcaagtggggcgggtcgacccgttaggtccgtggcccgaacctaaatttgtggcaccaataggttttcgggccggtccatattttcttaggtaacaatgggtccatgagtcagttgatcctaggggttttcgggtcggccttgttcgagcgctccgcttgctcgcgttcgcatggcgtcggcggctttagggctcccggcctgaggcggtgcggctccaccgcggatcgagccggcggcagtggctcccggcagaggcggcagcggtggcggcgcagcttccccgtggatcgaggtggcggcagcggctcccggcggaggcggaggcggcggcagtggcggcttcgacttcgcggtgtgatccaccacgggttgaggcagcggtggctaggtgtgcttcttcagtcctcctcacgtctccaactccccccaagactggtagtgtggttcacatgatagcaacaagcaacggattctttggttcttgattttcttattcttttctttggttcttgattctttggttcctcttctatgcagttccttctttcggcggccgacggaggcaccggcgggcgacggctacctgcttggtggccaaccggcgaggtgctccggaggacactccaccggcagcaacagtgagctcagtaaatctaaatgaaatcagctatagtgataattttgtggtcagtaaatttctcgtgctcttcttatcatctgtctatttaattttctgaaagagaaagatgtctatttgcttgattgcttgcaagatctcttccagctttttgtctttctatttatccagtattgcacaatgcctatatgggtttgttgccctacttgctagctttctgtaaaattggaatatgaagtttcaatgtctctatcatgtattcatctttatctacagaacctggacctggaggattccatggatggtggaagcttgtgaatgcccaaacaaaggatttggatattgatggttagtaatctatcaagaacttgtattatactatttataatctgagctagttcaactcttttacaacatatgagaagctctagatgtacaaaaggaataagcctcatttctggtattgcaatgctctgctttctgaaataaaacgatagcctaaaaatagactgtacacactactgctagataaatgaagaaaattagataaatctgctccgttgccgccgttggcctcgtgagatcgaggcccgtttcgtccattccgcgcgccccgccgtccgccgcttgccgccgctgtccgccgtcgtcttcacccatgccggtcgaatccctggtgaggactccctcccccctcttttactcccccttccccgtgtgcgccgccgtctttgggcgcttcgccgcctcctgtccgcgccgccgcttcggcagtgtgccaccgctgtctcccgcgccgccggtcgccgccgtcggtggccgctcgccgcagccgcatcgcctaaccggccggccagtttgaagccgagctgagctgagccaaccgggcgtctcccccccctgagccactgcccggtggggcccacccaccagccggtgccacctcctcccccttgagccactgtcgggctggtcccgcatgtcggcgccgccccccctttgctgacgtcatccgggatcctttattgcgcaataaaactcattaaggcttttcttttatagtaataaaaacagtttatttctaaaattcataagtaattcatccgagctccgtttaagtccattcaagtctcagtaaatcaagaaaaatgtatagaatccattaaaaatggttttgtttcctgtttcagtagacttatagtgtgttttccttgtatgctttgtttgtcgcgtagatttcggccgtttcgtcgatccgcggtttctcgaagacgttggtgtggtctgatcagtgcaagagcaaggcaagtcatacattacaattgatcatatttgtaacgccccgattttcgttcgggattaaatatcattaaataatgcattttctagaaattaaataaaagttaaagcaatttaatcaagtgaattattgagggaatttaaaatttattttaaaaatcattggccgggaatgttttgtaatattctttgtgccctaaaaaaaacactctaaaatttcccgcgaattttcggagctcgagaaataattttaaaagtcacaaaattcatttaatcaattaaataaaaagaaaaacaaattaatccctccccttctccgtttgggcttggcccaatccccttccttcctcctttcccctccttcccaggccggcctcgttctcctctcttgggctgtcggcccgtttccccactccctcacaaaagtctgcttttgccccctcggcctcctccccctcctctcgtcgacaagtgggaccgcggggcccactcgtcagcttctccccctacctccatccgaccggctgcaaccgccatggccgccggtttcaccccacgacgccgcgcctcccgcactccaccccgccccgcgagagcgtggactcgatccccacctcctcctcccccatttcccccactcctccccgcaaaatcagcgccgaaccaccgccaacctccccacgtcggcgcccccatttcaccggcggttgtcgccccaatcctccttgccccggctctctctcaccctcccgagcctatataaacactcccggcacctccctctccatttttccctccctcccgagccttcccatgcccaaaaaccaccctgccatcgtcgctccctctccccgccgtcgctggcgagctccggccgcctctagccgccgctctcgccgtcgccgcgctgcgccgtcgccaccaccgtcgtcgccgctccacgccacaccccggcccctacttcttttcccctctccgcctctaaaacaccgccgcaccgcgcgcccgatctccgccgcccgtcggcgccctccagctagccgccaccgtcactcccaccaccattggccgcctccgatcgctaattgccgccattcccggccacctcacaccacaccgccgcctctgttagctccaccaccgcgagggcaagcccggccgcccatcccttttttccctccaccaccagaaccacctccccaccacaccaccctaccggccacctttttcctcctccggtcgccgttcgccatcgccccggctgccgccgcgacgcgccggctgcatcgcctccctcgccgcgtcacgctctttctcggccgccgctcggtcgacaccttccattgccgggagcccctccgtgttgtcgacccgaggagcgtcgccgcctcccttcgccggccgctccctctgtcgccgcggctctcggtgagccgcctccctcctccttctccccttcgccggccgcctcccgtgcttgcgcgcgtcgcgccgccgccgccggtggccgcccggcccgtgtgccgccgccgctttgttcccggtcgccgccgccgccggccttgtgtgcccgcgtggccggtcgccgccatggactcggtccacgatgggccggtacctccttgtgtcgctgacgtgtggggcccacccctttgtggacgcggtccgcgcctcaccccttgctgatgtcagcaatccccttttctttgtaaaaataaataataattgcgcaataattcgatattaattctagaaattcatttaaatggctcaaagcttctaaaattcatatctaattcatccaaactccaaattgagccattcaagttgcaaaattcatctaaaattgagctctacatgttagtttactttttatgtactgttttcttggtgtttatttgagtttttcctcgttttgcgtaccagcatgtagaatccctcgtttcggaagtctgcggtcgcgaggaaaagagttcggaagattgtttgaagaagcaaggcaagtcacacattccccttgagcattttgaccctaccttacaaatgttttccgtttgcaaataaatatgcatcgttttgctaattacatgggaatagggttcacgtatatgcttgcttgtgccatattatttgatatctgtccttgtcacgaccgaaaataacacaacgggcgttccttacgtgcgtgcattattccttgtcccaggaggcaaggtacaccaaaagttgatacagttcagagtttaacaagtggaagcgtaaatagataatttattacatgggcggcgaaggcccagcacactcaaagacaaacgggaaacagcggaagactagggcgacgaccacaggcgcttgacggcaggcacgagctagacaccaaagccttcatcatccaggggctcctcttctgggtttgggaaaaattgagcaagactgagtacaaccaccgtactcaacaagacatacccacaagtgcagaataaatgcaagggagtaaaagggagttataatataaagggttagggtttgcagtaaacagcattaaaagacacttagttgctcaaagctattttgtaaatacgatcctagagctatacaatattattaaacaaggccgtgaacccacacgaacctgccttaacccaaggcctacgatgattcagaccgaactggcaacccgaccctgggtcccagctcgtcccaagccaacccaggccaaccattccacattttagttgttaggcaggttttaagaattaaaactctaacttgggtacattgctcgacttgcccataaccgagagtgcggctattcgaatagattatactctgatcggaggtgtacatctttacccacaagacacatcttcctcacgtgtaaccacgtgccacataccaccacggtatacggacgaaagacgtgacatagtttccaacccatcctagccatagacaagaataccgacccaaccccacctacggctggaacccccaggacaggtaggcaggactgagcccctagcaacaggacaccggccctgtgccatgacatctcgacaaccgggccgcagctcgtgtagccttcatttgtcctagagatgtccatcgacccccgacttcatccatctctatccgtgtacttttgtttataaccagactgagccacaaactaagccttacccactagacatgtagaagtacggtagtgctttgcaacagaggcccgagcttaatccttatagtacccgaggtacgactaacaaaacccaaccacgcacttcgagcccagcctaaaaccattttgggggttttgaatagagggggaggtgtgtgtccaattccaacataagccaaccattccatagtgtccaaatgatatgagaattcccaaagtctaaagttgtaaaaccacctaatgttgcctaattaaccagcgaagcatctacctaaattcatactagtggaaccatgagtagagtgtccactagttggggttttgtttaatctagggtgaacaaggtaataatatcaataacaataataataaggtcataacaaagataaataggcatggctaaataaaacaatgataacgcgggaatttaaataaagcgataatgcattaatttaaatcaaaataattttataaactgggattcaatatgttcaaggatgatgtgacttgccttgctcgctttcccaaacgtcggcttcaacttccacgaagagcggatcttccgaagctgcagcgtctacacgaccaacggaaaagaaaaggcttttactctaataaactccatataacaagcagaaacagagcacaaaaatgggttcttgacttcttaaggaaaaattagagacttgaatggtccaattccgagttcaaatggccaagttatggccatttgaagtttatatgctctttaaatgaatacttgcgaatttcttcatttaaattttaatttaaaaagggtttattgcgtcagccgagggggaggggcgcgcggaccgagtccacgggagtggggcccacgcggcagcctcacggtccacggtggaccgggcgcacccgggctcgcaccgcccggtgccatgggtcccacgcgtcagccacacccgaggacgcgggcggctgacagccgggccccacgcggcggccactcggcgcggccggcgggaggcggcgcccgcgcccctatggtcgccggcggcggccataggcacggtggagcggcggccgagagaggggaagggaagggggaaaagaggcggcggtcctcggctcaccctaggtcgacggcgacgacgaaaaaggcggccggagcggaggaaggcggcggcgcggctcgggtcgacggggtcaacggcgttccggcggtcggcgaccgaaacagaggggtggacgaggtcggcgaggatgcggcgaagccgaaggaggcggcgccgaggtgggaggtggtccggggcgacggcggcggcggaccggagctcgacggcgatggcagagagagagagcgacggcgcgagctcgattccggcgaggagacggtgcggcaagggcggaaacgggtgagggaggcacggggagggtttatatagggttggaaaggggagagagtggccggaggggaaggaaaccggcgcggtgatctcgggctccatcaatggcgccggcgagatttgcgggggcaaatccgcccgtttgaacgcgagagagagagggaaaaatggggggaaagggagaggggatcgcggggaataattcccccctattgattgcacgcggggacggcgggatgcggcggaatccgcggcggcggcggcgctagggtgcgggggaggcggcgagagcggcgggaggaaggggatgacgggtgggccccacccgtcagcgagggtggcgggcgggcccgcccgtcagcggcgcgcgctcggggagaggccggatgggccgcgggaaagaggagagagggggagggagatgggacgagccagcccaagagggagagggagggagaggggactttttagagtttttctttttataaaatcattttaactttgtttatttcttaataattattatttgtgctctgaaaattccactaaaatttatttacgtattttaggcttttaggaaatatacaaaaatcccccaagccttatttgacttttaactttgcacattttaattgttggaggctttcacacggattttaattattctcggcataatttagaggatgtattttagagtcgttttgggacgtgacggtcctttgtcaaatttgggtgataaatcgactagcttgggttactatgatgacctagctagaactttatgcttagccatgcttaattaccactagctcagtcgatgggataattgcagtattagaccttttggtatcatgacgagctgcgtgctcgagacatccggccatgtttcatagtcgtaattatccaactaaaacacgactgaatggtgggctgtgggtgcatggttttgctggtcgcacccatggcaattaaggaccggttcgtgggaaaccctggaagacatacagcgcttgccacaagcgggaatgggtaactgcctgacttgaagtatagctttccgctggctgacgcatccaggcaagggtgagcgtgatggagttcggatgggccctgcgacggcctatgcggctttctgattcgcctaggacgagaggggactgcccgctgcctgctgggggcgggggtgaaacctgaggtgtggtgtgcttggtcagagggggttatatggagggtcttgtcacaatcactcgacatggtgacgtgtctgcgcaggcatggtgacattccagtggattgtgtcttgtgggtacagttgtgcacctctggccaaagtaaaactattcgaatagccgtgcccgcggttatgggcgatcgaccagattcaccatgattagtctcacacttaataaatcgactcaatgcactgtagttcaggtgggttggttgggcctgttcaacgtggtgtagcgttgatcagtggagatttaatattaccttgattactcaattgttttactgtttgctcaataaaatgttttacaaccgcctttatgcaaatagccacaagccattcttgaatccctttgcacgtctgcatcattggtgtggcttgctgagtacggtggttgtactcagccttgctattattcccccttttcagaagtgtagtgcttctgagctgaagacggagtcagaagaccaaggcttagaccccagttgagttttgcctgtggagtggagctgaagccccgctaggatcgcctttttccgctgctgtcgttctcttttggtgtgaggactaagtgcctcttctgtaagtattttacgctttatttatgtttggatctgtatatttacttgtcgttttgtataccctggctggtcctggacagtgatttaatacacaaaatagtctggaaatttgggctaaatttctgggcatgacaaagtggtatcagagccaactcgactgtaggttgagccaaatggtcaaaccctaaggacaagctttctgataaccctatttgcaaaacgtctcctctcgcccttcggcatttctttgtgaaacggttttttcgaaattctcctccctttctctccaactcttttagttgcaaaacccggtggacaaaccgtcagcttcatgtctgttcggaagtcaagtcatgtcaggtcatctcaggcttcgtgcagcaaggagcaagaagatcagtccagagtcgtcgttccacgaaggccaagtgaagttttcctagaatttacctaaaacccaatccttcccggaagagtagtttcgttagctgctagatcgtgtgattgtttgcttgtgtgtaggggtatggtttgcatcattggtggggatgcgaccatactaggttgtttgcttaagcaacttgaacaataaaagtccattaacaacatatcaataggcaagaggtccagtaccttatctttagtaacccctctcatctccccctctctctcttgtgcccgcaacaattggtcagcatgagggacaatctcatcaggtcaagatctcaacaatttcatggatcaactcagtgcaatcctatgggcattccacgtcaacttcacgaagatcagcttcaaccccaagtcatggctaatcagactcaaacagtggaagagttgttacaacagatacgacgtcggtacgagatataccagatgcagcagatgcaacgacaatgttaggagccgcggcaaggccaccagccacaaatgcaagtccaggtgctagcccagaacctgaatcagagtcagagtcaggagttcccagtatcggcaccgaagacccctgtcaaaatgctgtccagatccccgaagataacttcagccaagccaccgtcaaaccaaagagaagtaagtgctacctgttatgactgtggcgagtaaggtcattatgtaaggaactgcccatggaaggtgttcgccaggtcacttgaaaaggacgagaagcagtgcccaggaagtaaccaagctccaagtcagcctaccgacaagaaggatggtactttgcagcccaactctggagcgaacaggacagtaatatggaagatggataatggttggaccatgatcatcactagttcagaatttactcctgaagatgccgcaaggatacccaagcgtcagagacgaaaaaataccttccgtggagcgcgtcagctaacccggcaccttataaagtacggtccgcccagacccgaagatgatgaatcaggagaacggttctctgctgatgacgatgacgatgatgatgatgacgacaatgatgcgacccttgatagtttcagggaaagagagttgaagttcaaagcatgtactagatgtggggtagtcggacacactgatagtttatgacgcgctgctccattgccgctgttggcctcgcgagatcgaggcccgtctcgtccattccgcgtgccccgccgtccgccgcttgccgccgccgtccgccgtcgtcttcacccacgccggccgaatccccgatgaggactccctccccctcttttactccctcttccccgtgtgcgtcgccgcctttgggcgcgtcaccgcctcctgtccgcgccgccgcttcggccgtgtgccgccgcctcctcgccagccaccgccgtctcccgcgccgctagtcgccgccgtcggtggccgctcgccgccgctgcatcgcctaaccggccggccggtttgaagccgagccgagccaaccaggtgtctccccccccttgagccactgcccggtggggcccacccaccagccggtgccacctcctcccccttgagccactgccgggtgggtcccgcatgtcggcgccgaccccccctgctgacttcatccgggatcctttattgtgcaataaaactcattaagaattttcttttatagtaataaacacagtttatcttctaaaattcataagtaattcatccgagctccgtttaagtccattcaagtctcggtaaatcaagaaaaatgtatagaatccattaaaagtagttttgtttcctgttttagtagacttatagtgtgttttgcttgcgtgctttgtttgacgcgtagatttcggccgtttcgtcgatccgcggtttctcaaagacgttgctgtggtctcatcagtgcgagagtaaggcaagtcatatattacaattgatcatattgtacccaatttacaaatgtccggcatttctattaaatattgcattgttttacaatatcatgtgggataggtcctactactcagccatatattgattaccttatgacattgataacttgggtactaaaatgactagatgttggtttaggagatgcttagccatgcttagttctactagtacacaaaagggaaatcacattaatgcatggactttgattattggcatagctttggattagtgccaccgcaatggtgttagttaattaaaatacactacatggtgggctgtgggtgcatggtttttctagtcgtacccatggcgattaaggaccggttcgcgggatgccctagaagaacttattgtacttaccacaagccagcgtgggcaacggctaggcttgtagtgtagctttcctctagccgacgtacccaggcgagggtgggcatgatggagttgggtcggccggggtgtccggttgatcggcttccggattcatcgcggcacgaaaggggggctgcccgttgcctgttggggacgagggcgaatcctaaggtgtggtgcgatcggttagagggggttatgtgaagggtcctatcacggcctctttccggtatgtcgtggtggcatatcggcgcacggaaacgtgtcgtggggctgtgtgttgtggatacagttgtacacctctgatcagagtaaaactattcgaatagccgtgcccgcggttatgggcggtcgaccagattcaccgtgattagtctcaccctagttagctaatgaattggtgtagttcaggtggttggttgggcctgttgcaacgtggtgtagcgttggacagtgattggttaatattgattaattactacaactgttttattgctttcaactgctgcttttaaatgctagctttatgcaaatgaacctctagcctcctttggttataccctgcatcataccttctcttccggtatgacttgctgagtacagtggatagtactcagtcttgctctcttttcccccacactagagttgaagtccttttcagttgaagatgtctcgaagaagttggcttcgtcgctgccgtcaaggatgcctgtggaatggagtcgcctcgctgcaggagtcaagtcttcaggtttagctcacttttatcttttccgctgcatttgtaatgttttatatttttgtaagacgtggatctgtatatcaacaattgtcgtttgtgtaccctggctggtcctggacaggggtttaatgcacattcagcttagaaattctggttcgtgaatttctgggcgtgacaagttggtatcagagccgaccttgaccgtagtacaagccaactggaaaccctaagagccctttgaaaccttttcatctgcatatgctctttgcacttggatttgtttcggaaaaattttggggtttgtccttttgattttgtgggaaaaatcttggtcgcttatttaattgaaatactccattgcaacaacaaaaaaaccatatattttggaaacccctattaagagaatttagtttattttttgttccaccgaaaaatgtttcacctagtgtacttagaatgtttcgctatgtatagatctaatgttgcagtgaactgaaacattattttgctatttgctgaaacattgtttttatataaggtgaaacaacacccgatttaaacgagtgaaacattttcgctctacttagtgaaacaattccgatatacctgttggaacatcatataatatttaaaaataattcaataataagctaaattttttttgtcggaatatatcaatgtgtggtcttgttctaaagatttaattgcaacgaatttaatgatgcaatcggatcataatttagataagtaatttaagagaaaaatcagtttaaaatagttttgcacgtaaatcgaacgctgacatcatgctcacgtgagcgcccgattttcccagccccgatcgggcgaccaatccgtagctctctccgtttcatatttgatttgagtgtttgatggcatgcggtttgcgggccttgcatgatgtacgcgtgctacgtggaacatacggaagatgcgggcttgacgcggagtaatcaaacgacaaatggaaaaatcagaaaagcagacggacccacgatggacaacgaatgaaatcgggttgtgtcgtgacgatgggaaaaatcctactccctccgtttcgaaatatacgacgcgattgactttttagcacataaaatttaagtaattattaattctttttttatcatttgattcattgttaaatatatttttatggagacatataattttacatattttgcaaaagtttttgaataagacgaacggtcaaacatgtcctaaaatgtcaacggtgtcaaacatttcgaaacggagggagtatgtttaaaatagcgagaatgattatatcgggcgaccggcgcgggggagctggatcgggcgctcccccgcgcacccctccccccacgtgcgtgcatgcaggccctggtcccaccgcgttgtctgctcccacctaccattgaaaaaaacccacatattttagaaactccctattaaaggaattcgttttattttttttcataaaaaatgtttcacctagtgtgctcacaatgtttcactatgtatatatctaatgttgcagtgaacgaaacattccattaaaaaaaacccacatattttagaaactcctattaagggaatttggtttatttttttctaccgaaaaaatgtttcacctagtgtactcataatgtttcactatatatagatctaatattgcagtgaactgaaacattctttcactatttgctgaaatattgtttttatataatgtgaaataacatccgatttaaacgagggaaacatttttgatctacttaatgaaacatttccgatatatctggtggaacatcgtacaacatttaaaaataattcaataataagattttttttcgtcggaatatatccatgtgtggtcttgtttcgaacatttaattgcaatgaaattaatggtgcaatcagatcatgatttggataaataatttaggagaaaattcagtttagagcagttttacacgtaaatcgggtgctgacgtcatgctgacatcagcgcccgattttaaccttctcccatcggatgcccgatcgtcacgtcctttaaatagggatagatattgcggtacggataagggtgtgttcggcacctcctttcccaacccctctttctcgttttccgtgcgcacgtttttcaaactgctaaacggtgtgttttttaaaaaagtttttatacgaaagttgtttaaaaaaatcaaattaatctattttttaaaaaaataatacttaattaatcacacgctaatacctctgtttaccatgcataccatgcagactgttccacgctggcaacttagcgaacacaccctgtcggtacaatgctacggtattttccaagaaaaaaaataagggtacggggaaccagcccatcgaatcccacggaagcccagcgagtggaagccaagcgacacgtgcctgcctgcctgcctgcctgccgccgccgcctacgccggggagtggcccggagctgatcgatccatgtcacgtgtcactggacgagacggcgacgatagccacgcgacggcatcagcgaagcacctccggaacctctccatccgctccggcggcaaaccgacgcccacctcaatgccgccgcggcggccctccgccaccgagatcgccccggtcttcgccacggacacgacgtccaccttcgccggcctcccgaacccgaagtccacgtcgtacacgcggaacctcggcgacccggccaccgctaacggcggaccgtcgctcgcgctcatccctccaacgtgttccatgcacctcttccagtagtccggatcgtatctcgttccttcgtccacggcggcggcgatcgcggcgcaggtcgtgtagaggccgtcctccgcgtcggcggcggcgatctcctccttgggcgccgaggcgaagcatggcccgacgcagttgccgaggtacttgtcggggacgcggggttccatccgcgcccggtgatcggtggggaagatgaagtgggcacggccatggtgcttattatctgcttcgacgtcgcctagtgcggctcggatgtggcattgccatacgatggcgaacgtcgcaacgacggacgtgcaccgaggaggcggcgacttgccgcgccgcgccgccacgccggcgactctgtccttgatgctctgaaggatctctcctgacagcgtgaaagtggcgaggagcttgctgtcggcgacgtcgggcgacctgaacttgtcagactcctccgttcgactgaccatgtagtcatagaggtcttcacgttcgcggatgaacgtgcggtcgatgacgggcggcttcggcagcaccgcggcgccggcgcaggcggcggcccaggtgtggaggaagtgcgtggagctcgagccgtcgcaggcggcgtggtgcacggtgacgccgagggcgaggccgcggcgcgcggggggcagcacggtagcctgcacggccagcaccgcgccgccatccgggagctccggcacgagcggggcgatcttggcgacctccctcgggtcgtccgcggccagctcgtcgacaccgacgccgtcgtcgtgctcggcgaaggtgaaggcgacggcgtcgcctggctggtagaagagctcgtaccggttggtcttgcccggcgtgaggcggaggcggccggcgagcgggtagacgacgtggagcgcccgggacagcgagtcagccagccgggacaggacggcgtcgacgccgtcgtcgtcggcgccgaggcgatagaagaagacccggtcgacgggcggggtcgggagccagatcgcgtccaggaaggtaagcgggacggcgcgctcgaccaacatggggacaccgtcgggcgacgacggcgcgacgcgggcggtgcgcaggacgcggaagctgccgccgcgagcgcgtggtggtggagctgccatttgtgtcgcgggcgccatgtctctcggcggcttagcgaccgatccgcgcgggtggctggggaatggagtcctacttctaccaggatataggagtcgtatatacgagtgacattgtaaataacgaggagacatctcctcgaagaatcaaaataccaacttggcaaccactagctcaaacacactaatggcacactaatgttcttctagaaccggcggccccacccgcattgcaatttgcgagcatggccatgcagcatttataccgtgaaacagaaaatttggtaagactcccctgcgaaagacttcatctcctgtgcaatacgtgtcccgtggtaatctcaaagcagataactccctcaaaccctcctaacgatacaacctaacgtcctgacgtcgttagcggagaagacgaacggacgcggtgcggctgcggggagatggacgaacgcggcgtgggagatgaaccggtgctcatgggtgaggtgcagcaagtgggtgaatcaaaccccacactcagcgaagccagccaaagtgagaagatgcttgttttactatccatctgttgttgattcttccatatggccgatagattgatgacttaaactcgatttttcattcgatttgattccatttgctgttggtaggaaccggttttacgttcaactctgttggtcatcatgctatgggtgaaagctcaaattgcaatcttgagggtcataatgtagtgttcagatcagatcgtgagaaatctgaacaagttactcaatcaaatataaaggtaaggcattctttttgtaataaagtgactgcaggttgttagcgtatatccgtgtagaagtcatctataaactaatatccaagaaaaaatccaatttaatatatgcttctattgtacctataggctaccaatcagaatgctccttgcgagcaagtgccgaaggttggcatgacctttcaatctgaggatgatgcatacaatttctacaattcatatgctagaagagtgggatttagtgtacgaaagtgccacgttaactacagagcagatggcactttatcatccaagtacatggtttgcagtaatgaaggtcacaagaacagtaatccaacacaccagccaaagaaataacgtgcttgtacaaaaacagattgcaaggctcgtgttcagttctttatttcctaggaaggtatttggaagctgcagaaaatcgaattggcacacaattacccttttgtaagtcctgacaagtcacacatgcttagatcacaacggcgtatgtcaaatgccgatgagcatataattagcatgatgcaacaagcaggagttaagctagctgagatatttgatttttttcaacggtggttaggtggagatgaaaatgtgccattcttacaaatggattgcaataactttattggtcgagagcgcaaaaagtatttagaaacacaagatgcacaaacattattggagtacttggataacaaacaagcagaagacccttctttcttttattctgtgcagttggacaaagaggatggtcgaatttgtaatttcttctggacagatggtcaggccattgcagattatgcttgttttggggatgttctctccattgacacaacatttcaaacaaacaagtctgaaatgccatttactcctattattggagcaaatcatcataggcaaactattatttttggagctgcattattattcgatgaaagtgctgattcatttgtttggctatttagaaactttttgaaggcaatgtcggggaagcaacctgaaacaattttcacagatcagtgtgctgcaatggcaaaggcgattatgattgtattcctaaactcaagtcactgtctttgcctatggcatatataccaaaatgctgcaaagcatctaagccatgtaatctccaataatcctaattttcttcatgactttaaaagatgtgtgtatgaagaaaggtcagtggcacactttaacttcaattggcaaaagttgatatctgattaccaccttgaagacaattcttggatacagaacttgtatgatttgcgtgagaagtgggccacaatacagaaggtagtaactgtggatcacagtaaggacgaaacaagagtcacctttaattcagttgatatgaatatatcatgttcttgcaggaagtatacctgtcttggtaagtgtattttcctgacatattccccattctagttgggattaatatttcacctctaacatattctgaatcatgtaggtattttatgcaagcatgtactacggatcttcaaccacaacagtattattgttttacctcctcagtatatattgagtagatggacaaaatatgcaaaaagaggaatctttacatgcaagagaaaaggccaaagcgacagcttagcatcacaaagtacatatctttgccgaaaaatgatatctgttacactaaaatgtggagtttccaatgaagtcctccaacacttggatcatggttttgataaactgaccatagaagtagaaaatttactaagcaaggtcaatctagatgaaaatgaagctccacaatgttttcttgagtgcacagaagaagttgcaaaagagcgcatatcaattagagctcctcctcacaaaaaaggtccattgcaaaaaagatctagaagtttgcttgacagaggaaagaaaacaacaaacaaaggtattctattttaacttgcttgtcttttattttttttcattttcatcgacttcattaagtaccaatttttgccttatgaacattgcaggagaagaaaccacacagccatcaaacataaatatagctggagcttcgcagccaactgtaagatcaataagaattaaatctccatcataatgcgagcgtactttaaaaattttcttgttttcctacaatatgaataggttcaggaaccacttgactcaaatattgtgatgccatttggtgacatttcgaggatgttcgttccgccaattcgaggagaattcacaaatctattatttcaagctcatcatgaaactactgcagcagcatcagcttcttggcgtttagagtttgaaaatcaagaccccaattcatcgacatcttatgactgatgttagaatcattttgactttgtcagagacacgagcatcaaaatctttccactttgtcagagacacgagtatcaaaatcaacttttcaagttctgttgtcttgttattttgggtttttgcatatggatattaagacatcttctaatctgatgaaattctgtgctgcttcactgttggagcttgttatcttaattcccaatttatataatcgccaatagtcaagtttgttaccggagcttcaatagcagagctctgtaattaatttatctaatcaccatacgagctcactatatgtatgatgctgaagatgccactatcaggagtcatggccgtatcatctcatgccgccggcgcagccgcggcaacgccacaaactcgccgtccctcacgcatcgctggcgtgggagtttcagcctcacgttcctgccctagctaccgcaaggccgctgctgccgcagccggggctttcgccgccgccaccacttcatcaggaatcaccggcgcgcccgggtcgccaacactccatctccctgcagccgcgccgtgccgcgccggttcgtcttctctgctaacgacgtcaggacgttaggttgtatcgttaggagggtttgagggagttatctgctttgaaattaccacgggacacgtgtcgcacagaagatgaagtctttcgcagggggcgtaagactttcagtcttaccaaattttcacggttataaatgctgcgtggccatgctcgcagattgcaatgcgggtggggccgccggttctagaagaacattagtgtaccattagtgtgtttgagctagtggttgccaagttggtactattggtcgagagctcgagaatgatttggttgtagcgtcactggtgacgatggccatgcattgtttcaggagaagccaactggtcttttgctgctgcagcttgggtgaattttgcggccgcgcgcgcgcggagctcatcgtcatgcagtgcagcttgcatggtcgatccgagtacacgatacggcagtgatacgcggcttgtggtgccaagtgccatgcgctggtgcgcacgtataactcgtgtgatagcccggttgtcgcacgtataactcgtgtgatagctcggttcaaacgtgtcccgcttcccgcgtacgtaatggtcgttgatttgctggggagagctgctatttttggtgcatcaggcgactggaattaattccaacacttttggcgcggggtgcatgcagcagaacaacggttgccgcgcgcccaagtttgactgacgacgacaaaaggagtgtgagatgtgagtttcatgggaaggccaagtgagggttagatatgacagagggtaattatatatttttacaatttgtttcttatttttgttgtctaaaaataatggaataatgtttcaggtgtctcaaagttaaatcttatggtaatccatcagcagcgatatgttcctgctgttgtagttaatccatttcctgaattctctatagacatcttattcttgtcaacttctctagaaccaatggtcaaaagaccagtactactactactctgtaaaagtttctagactagtgtacttctatgcatcaatggcagtgtttattccctttaaacttccaaaaattccgtcacatcaaatgtttggacacatatatagagtattaaatgtcggaaaaataaacaattgcacagtttgcatgtaaattgcgagacggatcttttgagcctaattacgccatgatttgacaatgtgatgctacagtaaatatttgctaatgatagattaatcaggcttaataaattcatctcgtagtttacaagcggaatctgtaatttgttttgttactagtctatgtttagtacttcaaatgtgtatccgtatataaaaaaaaatattttggcacaccaactaaacacggccgatgtgtagtagtagcaataggcagccagcggtagtactactttctactaatggggtgtttagattcagggtgtaaagttttggcgtgtcacatcggatattctattgggtgtcgcatggagtgttcgggcactaataaaagaactaattacagagtccgtcagtaaaccgcgagacgaatttattaagcctaattataccgttattagcaaatatttactgtaccaccacattgtcaaatcatggagcaattaggcttaaaagatttgtctcgcaaattagtcgcagtctgtgtaattagttattttttgtctatatttaatattttatgcaggtgttcaaacgttcgatgtgacagggtgaaaaattttgaggtgggatctgaaaaggggctatattcatgaagcttcaagtttggttggttgttcagcctataaatataggcaactagtgtatgtgtagattgctgatgtttcatccaggaaagattcgacgtcacgtcgccaaagtgcgttgcctgcgcgagttcgcggagccaaaagagggcacgcgttctccacggcaggtgagggagcacggcgcatggagaatggctgggcgctgcattgtggagctcgtggccttagcgttgcgtggcttcacgcggcggccgccagccctcccacaatacttgcactgttgtatgaagcttatcaggttcttcgtctacgtggcacatgaggaatagcaaaaatttgtggcgcgctgtgaacgccctaatacaagcaaacaagttacaacaagcagcccacatattcaaggcaagctccactgcatcgagtactcccctctgttcccttggctagctccacttcatccagcactcccctctgttcccttgcttacaaatatacaccaacaacaaattagagcgcccaagttcgagtagggcgtgacgaagtagctcgacgtatcggcattgtatattgaagctataggtatggcttcaagttcgagcgccacaatgacgcggtctatggttcctgtatttacaagagaaagttatgatatatggtgcatcaagatgtggacactgctactatcaaggattatgggatattggaaagtactctttgatgatgaggacacaactaactcggatataaccatgattaccttatgtattaatcaaccaaaggtgtatatgttttatattagatttacttgttatatatttgaacaaacgttgctacacaatgagttttgtgtgttttcgtttgcagaggtatttgcttgggcgaaagaaaagagaccgagcgtaaggaatgcatggatgattgaagaagttgattgggggaccaaaccaagaccttctccaagtcttcttttatatcaccacgtcacttttggtctatagaagacaagagataaagttctacatgttttgtattcagattcgggcctcctgatagcatcaacttcaaatggacctagccactgatctagaaggaatttcagggcccatgagtacttgttagaaagcttatggaatctactttcagatggttttggtcccacgtcaaaattaatactgagctgtcgggaatctgcaaaacaaaccacatatctcatccagtccaaatctgatttgggtttttgggccttgtaattgtgtcgtgggcttagcccatgagggtgtgcgccctagggcaaccctaggacgtccctaatcatacttaatcagtagccgtcatcgtttagagtcgggttttgcttagattattttgccaagaatagtttcgccgctagatcggtttgtagaacaccaaatttgagtgcttaatcattcatatgcaattgtgttgcaatctatcttgttcttacttgtgttcttcgattttgcatgtagggattagctttctcggcgaggtcaactgggtttcggcacagttggtaaccagaggagacgtggtgctgcgattgcggggctcagtagcgtgttcgttcagaagccggatcgagttgtgtcacgactctgcccaaatcgactgtttatcaatacctattgaaagatcgggacctaacaccctcatcactcttatagcggaacataataagtctctgacggagaatcgaatgacggacgccaaagccttgttcttgatccaataaggagttgtggaaagtctatttccacgtattattggcaccaaaaaatccaaggaagcataggataagttgaaagaggagttttaaggatctcagaagttacttgcagtgaagcttcaaactttgagaatgcaatttcagaatttacaaatgaaggcgtcagaaaaggtaaaagactatttctcaagacttattaagatcgttaatcagatgcgcctctatggtgaggatattaaggatcaaaaggtcatggataaaaattttaatcagtcagcctaaaaaatacgagtacattgttgctgctattgaggagtcgaaagacttgtcgactctcacaacttagcaactaatgagctcgttggaatctcatgaagaaagaaagcttcaacgagaagggaacttcgttgaaaatgcatttcaatcaaagttgagcttcaggcctcaaaacttaaggttttgcgggaattttcagaaaaatggatttccaatgcaagaccgtggttgttttcagaaaaaaaaaggattttccaagtagaacatgatgcagaaggaagacaatcaagaaagaatagaaaaagttacatccagttcaaatttgtggtgtgacatttcccaaaatctagtcatattacagatatgtcctggaagaaaatgacctgcaacaagtgcaaaggaaagggtcatattgcaaaatattgcagaactcgagaaattaatcgggctaatttttcccaagaaaaggaaaaatatgaagaaatgattttctcttgtcgtactgcttaagaagaaaaggataatgtttgggttattgacagtggttgtacaaaccacatggctgctgatccaaatttatttcaagaaatagattcatcatatcatgcaaagattcacatgggtattgaatctatatcccaaagtgaaaagaaaggtacggttgctgtccaaacagcagtccgtccaaaatttataaaggatgtcttgccggtacccgattttaagcaaaatttgctaagtatttggcagcttctagaacacaggtatgcggtttattttgaggaattttcttgcaaaatattggatcgtaaaaataaccgtctggttgcaaaataaatatggggacaaacataaattttttgttgaagatgaatcatcctactcaaatggctctcagaagtgaagttgatatttctaatctatggcacaagaggatgggtcatcttagttacagagcactaaagctactcaagactaaaggtatggtacaagaccttctatttattacactgaagtttgacccatgtgaaggttgtgtaattggaaaacaaattagaactgcctttccacatagtggagcttggagagcaaatgcaccattggaactagtacacactgatatagttggtaaagtgccaacaatgtcacaaggagaaaattgatattttatcacatttatcgatgattatacaagaatgatctgggtatattttctaaaagaaaaatcagcggccctcaatacattcaaaaaattcaagtctatggtggaaattcagagtaatcgaaaaattaaagtattatgcagcgatcaaggaggagaatatatctcaataaaatttgagaaatattgtgaaaatgcttgcatccaaagacgacagttaacggctggctatagtgctcaacaaaatggagttgcaaaaaaaaatcggacgattaatgacatggcaaactctatagtccaagacataggtacgcctaaatctttctgggctaaagcagttaacactgcaatttatcatatcttactataaagtcataatccactaatcctaaagctcaacatgcaaaaatgccacctcatcatccactggcaataatatgcaatcatgcagcatcatgtataattcattgaattctacaaatcaacatccaatcatcttccttcacactatttttcgcaatactatatatatatatagttattataatacttaacatatattcatccatataataaaagtgtgggatatcatattcatctacaatctcatacagagtctactaaatttttttctctctaaacattatttgacaaaccagttttatttattgttaataagtaatataattcttacttttagcttgattattaaaagaatgttaaaagttacttagcaatttccgcagcaaagcgcggggaatcacctagtattttaaatagaagtcctacaaggcagtaccaaactatacaccttttgaagcttggtatagttaaaagcctgtcatttgtggtcatatgagagagtatttggttgcatttgtatgctcaagtgtcagcacaaaagagagtaacatttgataatagaagtgatcgctgcatatttgtgggctatgctgatggtattaaaggatatcagctttataatctagagaaaaagaaaatcattatagcagagatgtgatttttgatgagaacgctagatggaactggaaggttccataagtccctattaatcaattaatcaagaaggcattatatgaattaaagcaagctcctagagcatggtacagtcaaattgacaagtactttattcaaaaaggatttgccaagagcaaaagtgagcctaccctatatatcaagaggacatgtatgaacattttaattttctcactatatgttgatgacttgatatataccggcaatagtgagaagctgatgtaagatttttaaaaaagacatgatgaatatatatgggatgagtgatcttggcttgttgcacaatttcttggtaatggaagtgcatcagagtactgaagcgatatttatatctcaaagaaaataagtagaaaataattctaaagaaatttaagatggataattgcaagtcagttacaacccccttgttgccaaatgaaaagcaaaaggcgtacgagagagagagagggatatgggaaaggagggataagagagagagggagagggatctatttatgtaaagttaaaccgtattcatacaatgggacccaccatatagagaaattcttgcttttccacattgggtgcataaatcaagatgcattgacggacggctgtgggagatggtggcccaatggtagaaagtggacacaggcgagtagtgaggtgtcggcggcagcatggaagccacggggatggaggagagtgatgggccgataagggcaaagtgaagcttctggttaggagacaatggtaggtggtgttgaatctggcggtaaggaggcaagggagtcggggaaggaggtagggtgggaggacctcgccaccgttagcttggagaagggggaggtggaggaggaggaggaggcagccaagggaccaagcagtggtggtgaagaaggtggggcggatttctggtcacctaactcgtgccctctcgtgtgatacgcgatgattgcaggataagagtaaggggttagagttgggagtaacgctaatccaacagtctaaaatttgccaaaaatttgccaaatttacaggagtgttttctatcgaatgtcaaataaacagtcccgtatatttaacaaacacgtcataaatggtcacaatacgatattaatccatttcaaatatatcgaccataaacaataaagttgatacaattgaaaactgaattttacagtctaatagattcgaatttaaattacactcatagtatgtactaattggtatagcgctgaccagctattgaccgaagtgactatttagcggctagtcaagcgcggtcccctccgcgcgaccggacacgtggcgcgcgtggagtggggggggggggacggtgcgttctctcgttcttttttgtttttttccgtttctttcgctctcctcttttttttttcctttcccgtttcattttgggttttttccgtttcttttcagttttttcttccttttcttttttttcttccgttttttaatacatgcgtatacaaactttgtaaacatatataaaatatatatataatatgtatacattaaaaaccaacaaaccatatatgcacgttttttttctttggttttctttctggctcagttttttggtttttaatgtatatgtttacaaactttctatacttacatatacaacaaagtttgtatacatgaatataaactttgtatacgtacgtatacaaagtttgtatatgccatatgtttttctggcttttttttaatattttaatatgtacatatataaagtttaagtttgtatacgtttgtatgcatgtattttttttctatatgtatgtacataaactgtgtgtatttacatatataaagttgatatattttgtatacatacatatacaaactttatatataagtatacaaactttgtatatgttgtatgaaaactttatatacgtacgtatataaacttttttttcttttttatatgtatgtatacaaatttgtgtacatatgtatacaaagtttgtatacgcacgttctaaagtttgcatacgtgtatataattttttataatcaaagtatatataggtaagtatttaaattttatgcatatgtatacatatataagaatattactaccttcatctcctaatataaaaggattttgacattttgtttatattatttgaccactcgtcttattcagaaaatttgtgcaaatatatataaaaagacgaaaaattataaaataaagtaagtcataaataaaataaataataaatctaaacttttttttattaagatgaatggtcaaatagtgtaagtattaggggacggatggagtagtgcaaactacatagcagtagtagtatcatacagcaacagagtagactagttgtactgcacgtagtagctagtagtctagtagagcagaagcggcgcggggcgcgcgcccacgcccctgcgcgaccagtcgcccattaggcggccccgctattgacatatattcaatgccacttatcactggatcacgacgacggccacgcgacggcgacgtcttcgccgaagcacctccggaacctctccatccgctccggcggcaaagcgatgcccacctcaatgccgccgccaccgacatcgccccggtctttgccacggacacgacgtccaccttcgccggcctcccgaacccaaagtccacgtcgtacacgcggaacctcggcgacccagccaccgaaagcggcggagcaccactggtgctcacctctaagctctgctccctgtacctgtcccagtagccgggatcatatctcgttccttcgtccacggcggcggcgatcgcggagcaggccgcgaataggccatccgcgccggcagcagcgatgtccgttctgggcgccgacgcgaagcacgggccgacgcagtttccgaggtacttgtcggggacgcggggttccatccgtgaccggagatcggtgacgaagaggaggtgggcacggcggccatggttccgaggctcttcttcgacgtcgcagcccgcgcctagtgcggcccggacgtggcaccgccatatgacggcgaacgtcgcgacgacggacgtgcaccacggaggcggcacgccgcggcgcgtcgccacgtcggcgatcctttccttgatgctctgcaggttttccctcgacagcgtgaaagtggcaaggagcttgttgtcgacgacgtcgggcgagttgatcgtcgtagtctttacgtggtcgtgcagtcgagcggtcatgacgtcgtggatgtcttcacgttcacggatggacgtgcggtcgatgacgggcggcggcggcgtcgctgcggcgcctgcgcagatggcggcccaggtgtggaggaagtgcgtggagctcgcgccgtcgcaggcggcgtggtgcacggtgacgccgggggcgagggcgcggcacgcgggtagcagcacggtggcctgcacggccagcaccgcgccgccatccgggagctccggcacgagcggcgcaatcttggaaacctccctgcgaacgtccgtggccagctcatcgagaccgacgacgtcgtgctcggcgacggtgaaggcgacggcatcgccgggctggtagaagagctcgtaccggttggccttgccgggcgtgaggcggaggcggccggcgagcgggtagaagacgtggagcgcgcgggctagggagtcgaccaacctggacagcgcgacgtcgacgtcacacgtcgcaccgccgccgtcgccgaggcggtagaagaagccccgctcgacgggtgggcggatgagccatatcgcgtcgaggaaggtgagcggctgagtggcctccggcagtgggttgcagccggcaccggccgacgacgacggcgcgacatgagcggttcgcaggacgcggaagctgccgccgtgagctggcgatgtcattgcagtacgtgggtcggcggaccgcggatcgagctccctggattctagatggctagcgacgtaatgtgtagtactgtattagtccctccctcccaattttaatgtataatgacagtgtttagttctcttcaaaatttcaaaaattccgtcacatcgacacatgcataaaacattaaatatggatgaaaaaaaccaattgtacactttacatgtaaattgcgagatgaatcctctgagcctaattatgtcatgatttgacaatgtgatgctacattaaatatttactaatgacgaattaattaggcttaaaaaatttgtctcgctgtttacatgtgaaatctgtaatttgttttgttattagtctacatttaataattcaaatatgtatccgtatactttaaaaaaaaagttggcacgcgaactaaacacgccaacatcattgattttatttttgaccgttcgaccatttatattatttgaaaaatttatataattattatttatttaattgtgaattgatttatcattaaatattagccagtattcctgcaagttgaatttagtgcacatattgactgccccatcacgagatgtgtactgcttcttactattcatagaaaaacctgcagatattttaaaacggatgagaggcatagattaggaggtccttaattaacagcctaaacgtttttatcaaagggcaattttgtctttagagaaaattatgcagcatctcggcccctcccctctcgtcgttcttctccatatccggcgccatcgctcgaccatcttgtcaaagtcaccatggcggcacccaccggcggctctaatgggtggtccgggtggtccctgaccacccaaaaaaattagcgacccaacacgtttttttgggtaaaaaagaaaaaaaaaaatcccgtgaggctgaagcttccaaacgaattaagcgacgccgtttccgctccctcttcgctaccgcgactccatctccttctcgtcgcgcgattgtagcagcggcgccatcacgcgtgcatagcgcggcggtttgttgctggctgctccttctcttccctacttcctggggatcaagtgacgatgggccaacaacgtacaagcaaagaagcaagagggcgccggagtgctggtgcggctgcggcagccgacgacgacgtgcagtgatcagcgcctgcatctagggcattggccaactgggatctgcgcgagctgcaagggaaggaaccaacaaagagcactagggcaggtgataattaattactcctactgattagcagattagaaccatattaggcattcaattttcagttttgacccaactcatacatctaaaattctactattgtattgtagatgtagatgtagattcttaaaacataacaacagatgtagatatttcatctcatttttagaaacatgcaaaaaaaaaaagaagcttctgaatatcctttcccagttatgacagaagagtatactctaaacaagatacggaagaagcggatctattacctatatttatattttatatattaacattattatattcgagatgttttaaattttttataagtcggaccacccataccttaaattttagatacgccactgacagcactacccacgaacaaaactgttgtagtcgctagtgtctacatggatcccgttgtcgtggttagaaccgcagattgatcccaacaatcaacagatcaatcctttggctagcacaagatgtatctggactgggagttcgtactcaagacgcccacaaaattaagccctattacttttccttcactgtcgtctcatctacgatatttgctttgaaataccttgattcggttgcttcaatggcagtacggttgagtaatccggtcagttatcgattctggaccagcatcgccatgaattggaagaagcttggatggcagtttaagtggagagagatagaggagaaaataaaatatcagggtaagtgaacgaacacattgattcttgcttgctcgacccatggtgctgtgccaacaattgccgttgcttaacttttcgatgcatttcgtacacgataatgattgcagcttggaatgcatgcatatttcgtttttagtttgtttcagactatcaggtgatgatcgatttgtttttgtgatgcgatgcaaatgcaatagagatcttgttgtgctgcgatgcaaatgcaatagagatcgctgttgttaattagtggttttcagtttgtgaaaagttgccggtgatcagtgttggtgtgggctccggacttataggatcggagataactccctcaaggatgaaattaccctccctaaatgaagtttacactatccttctaatctggtcatcttctttaaaaattgtgcagtttttaatacattgaagagcatagaagcacatcacatatttatatttgcacaaaaattttgaataagacgaatggtcaaacattagtctaaaagtcaacggcgtcgtacattaaaatagagagagagtataatttatagggaaaatagcaaaaaccaagtaaaagtcgcttcaagtttgatattttatcacaaattatttgttgcaaataatcattcggacttggttttgttgaaaaaccacctaagtgcacacgtgcttaaccaaatcaatatgttttcataattgtgaaccgtcaatatggttttaccaaaattaaatagctttaaaagtatagccttaacacttattttaatttgacaaatagaattgcttatgagagttcaaacattgttacaccgaggttctctatttgtagaagatttcaatgacaaatgaaaaataaatataatgcaaacattagaaaaagattgaagcggctagcttaacctgtggtggtctatatcagcgataatggggtgatccggttaagcacgtacgctatgcggtttttataacaaaaccaaattggtcaagtatttacaacaaaatgacttatgaaatcaaatgtcaaactcaagtgattttaacaaggtggggcagatttctggtcgcctgactcttgccctctcgtgtgctgcgcgatgatggtagggagggaggagaagagtaaggggttagagttggaagtaatgctaacccaacagtggaaaagtgatttcatccctcaaagggatatcctcttattttgtgcatgccatctaaatagtcatcaaaaagtttgaaaaaaattggcaacatagattaatatgaaatatatcacttcagaaacatgcacgtttaaattaaacttctacaagtcgtaaaaaaacaacaaatatagttgagaatgtacgataactatttcagtttattttgttcttttgctacaacttatagaagttgaatttggtcttggatgtttgtggagtgatatatttcatattaatctatattgttatttttttcaaattttgtaataactatttagatgacatgcaaacaacgagagaatatcccctcgaggaatgaaaatacacatccaaccaacagtctaaaatttgctagaattagaagagtgttttctatcaaatgtcaaataaatagtcccatgtatatattcttttttttagaattacacgctacaacgcagatactcacaacgcacgcacacttacccctatgaacacacgcaggcaaaccctacccctatgagcatcttcgaagacagggttggtaaatcctggagattgacgaagtcaccacaggcgcctcgctgttgacggatacgtcgcctaccactgaaagtacaataccattaaatcctggaaaagccggtagtgctaaaactggcacctataggccttttcccacctccgtaggttgaaatcacaaaacaccgacacctttaagtaattataggtgtcgattctaaataaaaaccgacacctattctattttgtgtcggtttttaaaaaaaccagaacctataatattaaaaaccgacacctataataaattataggtgcaaaccggcacctacgaatttagccgagccggtaggccccaccacgacgcgtcgaggacgaggagataaggtccgcagcgtccactcgcacagtcgaactctctcgatttctctcgttctctccgctctctctcccctctctctcgagcaccctctctctctcgacggtggaggcggcggtggaggagcggcgtgcggtggctcgtctctcacttgctgtcctctctctcactgcccgcggccggcggcggccatgccctcccctccgccagatctagggaggggcggcccagcggcggccgcggtgggaggcggcatgcggcggcagaggggaggggggatgcggcggcgggatgagaggcggtggcagcctggcggcggcgccctcccttctcgactctctctcgctgtcctctctcttgcagggatgagaggcggtggctggtcggcagtggccgcgccctcccctccaccagatccggggaggggcgtcccagcggcggccacggcgggaggcggcatgcagcggcgccctccctcctctctttctgtgatgattttctgtgatgttcttcaatgttagtgaatgatttctatgaaagatttatgtgatgttcttcaatgtttcttgttctgtgatgttgtttgattgggaattgaggattgtaattgatttggagttctatgatgcggggtggatgagctcgatgcatcgagcctatttttttggctcgcaaatggttttaaagatgctagtttttaaaacggaattggtgcccgatcactctttagtgccgcctccataatgcaggttgggaaaaccaacactttaaggggtttcccaaccagcactattcatgtgttctgtggtagtgttaacaaacacgtcataaatggttacaatacgatactaatccttttcaaatatgtccaccacaaacaacagaaaattgatacaatttaacttacagattcaaagttaaattacactagtatagctggtatagcgctgaccagctactctctaccaattgatattcaatgccccgacgacgacagccacgcgatatcatcgccaaagtacctccgcaacctcaccatccgctccggcgacaaagcgatgcccacctcaatctcaatgccaccggagcagccgccacggccctccgccaccgacatcgcgccggtcttcgccacggacatgacgtccaccttcgccagcctcccgaacccacgccgtacacgcggaaccttggcgacccactacgctgggtagggctacctgtgacgggtccaaagtgtcacctttgacggatatagctctggtcagatattagtggtcactgatgactctcctcacctttgacgggtgtagacctgtcagtggtgaaggctacctgtgacggaccacatataaaacccgtcacaggtgactgttatctcaaacgacccattattttgtggcccgtcactgatgtctttaacccagcaaaaaaaaataaaagaagcagcatgcaacccgtcactggtgtgaaaaacaaacaaaaaaaaaatggtgcacactgctgtggtggtgctcgttgtcacaggctcagagctgctttgctcacattcatcatcacacaaaaaattcaaaccgatagatctcatatagaagtattcacacaaagtggatggcaagaatttctcaatgcacagacaacaatatcatatcaatgcaaaagtatagggggcgagaggggcacaccgcacaccggcgacagatctggcgaccggcgggcgagggatggcagccatggcgaccgaccacatcggcggggaagaaagggtggaggcgctggcggccgggaggtgggggaggcgtcgatggccagatccgtgtcccagaggccagatccgtgtcccggaggcagactcggcggttgtcgtcggtggtcatcgtcgtcgtcgctcgagcttagcgtcggtgaccccgagctcctggaggccggcagtcggggatggaggccgcggcgccaccgcccacctcctcctcgcctccgcacgctgtcgagccctcctcaccgctgccatgcatcgctgagccacacactagatcggaaataagagaagggggaggaggggagaaagaagggggaggaggatgtgggtaccgccgccaccgctcgccgcctagcgccgccgcaccacctcgccgctttgcctccgcaccaccgctgccacccagcgccgccgcaccaccttgtcgctgcgcctccgcaccaccgccgctgccacgcgccgctgagccgtcgcccaacgccgccgaaccaccgccgcgcgccgccgccgccgcctctctctagggtcgtcgggtcctccgccgccccgcaagagcctcccctcttgtttctgtgagtgtggataagggagagagagattttttgtttatgtggataagagagagtgtgtgagggacagagtggataagggagtacatattagtatactccgcccccctccccacctgtgacgggctccagtgatgggtccgtttgaggtgagttaacttcacctttgacagtttataaggatgcaacccgtcacaggtaactagttacctgtgacgggccggatgtggaagccatcataggtgagatttacctcacctttgacggtttctactgtgggaccgtcacaggtgactagttatctgtgacggattgcagaaggatgcctcaccgatgacggcgtcccgtagaacccgtcaaaggtgaccctcatcactgaccaatactaaagcccgtcacagatatgccgtcaaagatgtgaggatctggtgtagtgaccccgccaccgaaaacggccaggtcatcacctctgtgctgcgctccctgcacctgtcccagtagccttgatcacatcgcgttccttcgtcgacggcggcggcgataataggccatccgcgccggctgcggcaatgtccgttctgggcgccgacgcgaagcacgtgccgatgcagttcctgaggtacttgtccggtcgactgccgccgtctctcccggtcgcccgccgccgcgcgcacgagccgccgagcctgccgctcccggtcgccgttgcgcgcatgccgccggggccatcgccgagcggcgcggtgccgccggccgtgcccgcgccagccgcgctctggagaggagagagagttgagagagtgagagaggatagagaggtgagagagtgtgagagagagtatagaaaagataaggattgggatgggtggatgagatgaaattttgaagtgttgacaaaggaaagagaggatggatggactttttgtaggcatgtttttaagaggttcgtacgtgaaaattggttttcgcgtaagaggcccacacgtaaaaatcgacttatttttacgtgcagacccttaagagacccgcatatgaaaatcgattttcgcatacggacgtgaaaacggtccgtatataaactaaatagcttctcgtctaggaaaatcgtttctctactagtgtgcaatctcctgcgaaaatagatgatttttgtaggcgggcctgcggccatttttgcaagcgacatctccatcttcgtaggcagtgattcatccgcctacaaaaacacattcagtgaataaaaaacaaagccgcacacgggcgccgccgtaggcctccccttccagccaacggctctcctccaacggctctcctccgtccgccgctgctcccacaggcgtcgtcctcgttgcgtcggcgccatcgtctcccacaggcgttgttgtcgtcgtcgtcgtgtgtctcctcctctacccataagcagcaccgtcatcgtcgtcgttgtcgcgcgtcaccgtgaaagggaggagccgagctgagtcacacctcgccgggagaaggcgggcgagccggcggcagatccacaagcgtcggcgccgtttgtcgtggccagcggcagaggtggcgaggagctgagccggtggtggatttgctgctgctggtgaacaaatgagagagagagaggagtgggaggaaaatgagtggtggggaaaggatagggataaaactttgatattttttgttggcatgattttttacatgttctacctgcaaaaatcatattttccagatggaccacttaagaggtccgcatacaaaaataaaggtttttttaggcggatctcttaagtggtctgcttgaaaatattgattttcgcagacgaaaagagagctccatcccgatttacattttcatggccatttagctccgcaggtcatatccgtttggaagaaaatctctgaacatctgtgaaaatgctttttctagcagtcgtattatcctcggatcgaccaagctgctccgcatctgtatgacgatgagctccgcgcggccgcaaaattccgaaagcagcagcaaaagtccagttggtttctcctcaaacagtgcatgcaaggccatcgtcaccagtgacgctacaaccaatcaatctcgagctctccgccaatacaaacttgacaactagtgaaacacactaatggctttctagaaccttgcatgcggccgcattgcgatttgcaagcatggggcatgcagcatttataccgtgagacagaaaaaatggactatatagtaggagtacgtcactacgtcctgtataggactccatctactcacatcagccacgcgcgcggatagctcgctcgctagccgggagacatggcgcccgcgacacaaatggcagctccaccacctcgcggcggcagcttccgcgtcctgcgcaccgctcgcgtcgcaccgtcgtcgcccgacggtgtcccctcgctgcgccagcgtgccgtcccgctcaccttcctggacgcgatgtggctcccgaccccgcccgtcgaccgggtcttcctctaccgcctcggcgccgccgacgacgacgtcgacgccgtcctgtcccggctggctgactcgctgtcccgggtgctccacgtcttctacccgctcgccggccgcctccgcctcactcccggcaagaccaaccggtacgagctcttctaccagccaggcgacgccgtcgccttcaccgtcgccgagcacgacgacggcgtcggtgtcgacgagctggccgcggacgacccgagggaggtcgccaagatcgccccgctcgcgccggagctcccggatggcggcgcggtgctggccgtgcaggctaccgtgctgccccccgcgcgccgcggcctcgccctcggcgtcaccgtgcaccacgccgcctgcgacggctcgagctccacgcacttcctccatacctgggccgccgcctgcgccggcgctgtggtgctgccgaagccgcccgtcatcgaccgcacgttcatccgcgaacgtgaggacctctacgacatcatggtcaatcgaacgaaggaggagtctgacaagttcagctcgcccgacgtcgccgacaacaagctcctcgccactttcacgctgtcaggagagatccttcagaacatcaaggatatagtcgccgccccctcggtgcacgtccatcgtcgcgacgttcgccgtcatatggcagtgccacatccacgccgcactagcaagcgacgtcgaagcagagaacaaccctcgaaaccatggccgtgcccacttcgtcttccccaccgatcaccgggcgcggatggaaccccgcgtccccgacaagtacctcggcaactgcgtcgggccatgcttcgcctcggcgcccaagaaagagatcgccgccgccgacgcggaggacggcctcttcacgacctgcgccgcgatcgccgccgccatcgacgaaggaacgagatacgatcccggctactgggagaggtgcagggagcacgtcagagggatgagcacgagcgacggcccgccgctagcggtggccgggtcgccgaggttccgcgtgtacgacgtggactttgggttcgggaggccgacgaaggtggacgtcgtgtccgtggcgaagaccggggcgatctcggtggcggagggccgcggcggcggcattgaggtgggcgtcggtttgccgccggagcggatggagaggttccggaggtgcttcactgatgccgtcacgtggctatcgtcgccatcgtccagtgacacgtgacacgtggcgcgcggcaggcaggcaggcaggcacgtgtcgcttggctttcgtgggcttcgatgggctgcttccgtcagctatcacgtgcgtgccctatgtgagccgtcggatggcttggacgattgataagtgctgaaggcacgctatatgcacatgcaccccggacgctttgctctttttttttttaagagaataccgtagtattgtatcgacgtatccgtatcccaatatccatccctatttaaaacatatatggatttttctcatcgtcgcagataaatttgtaatgaaaaaaacaaattaaactacagctagtttaatctttcacattcgcagtatcaaagagcaggcacgaactatagaaatggatacacagtagtgagggtacataaagccgacaagcaaagagcgagagagaggatcggagtcagcgaacaccgaacagaggacagagggcagagttgcgtcatccactccgcctggataaagtggccggccgcacttggtactcgcatgcatgctcgctgattggttggctggcagcttgcacgctggacccgcatgaccacatgcatgcatgccctgcccgtgtgggatatgaagatttcttcagctataaaataaaatgaaaatcaagaagctatttttaagcaatcatgaaataattctcgtctagcttattcccccttctgcaagatcggaagtcaaccagtggctgcagctgcagtaggagcggaaggtaagattagcggctatggcaagaacaagaagaaaaagaacagcaggttcataacctgcggtcctgcgcgcgatcgatttgcagcagcaccaaggaaagctcggcgtcgaccaggggaagaggccggcaccggagaagccgcggcagcactggccgcacgtcgaccagcttgctcctctcgctgatggctcccgatcgactcccgagtcccgagtggccgatcctgtcccgatcacggagacttcgccgcggcattctcggcgtgcgtcgttgtcgttgaagtggacaactccgtggtgacggtgggacacgtcgccgacagccgcctccggcgacggcgaccactgacaccactagctagcttgtcgacgacctcgcgaccatcggcgctaacatcgctgctatatgtcctccatcgcggcggtgcagatgaaaatctccaccttatagcagtgtcagtcagcggtgctcgaccccagcagcctcctccgtcttctcctcctgatgatgttttcgtctagcccaactccctcgccgcctaacatgcatagccgacggagctcgtcgatcaactcgccctcgcctgcgaagccggaagctgagattaggattaagaattcggaattaggcagggcccgacggccaaacagtcacgggtatagatgggccaaaaggttcgggggccgatcgatggcccagcccacggcatgaccttttggcccggcccaggcatggcacggctagagtgctgaatggtctatgccggcctggcccgatagttgtgcctggggacggtgggctggcccgttacggcacgaaacaccagagatgttatagacttattcaccatatatatatatatatatatgacacgacccaaagaggatggaggcatgatagacttattctaggcatatactccctctgtttcaaaatgtttgacaccgttgactttttagcatatgttggaccgttcatcttattcaaaaaaaaattgtgaaatatgtaaaactatatatgtacatgaaagtatatttaataatgaatcaaatgatatgaaaaaaataaataattacttaaattttttgaataagacgaatggtcaaacacgtactaaaaagtcaacggtgtcaaacattttgaaacggggggagtataagacacaacccaaagggcagggaggctaatagacttattccagccataggtaagacaggacccaaaaaggagagatacaaaatagacttatttcaaagataagcacgatagatgtgccttcgggccggcccagcacggtcagactctaactaggctgtgcttgggccataggtggaggccgtgggcgggcatggccgtttggcgggccgtgccgggtcgtgcctggccgagcggcccacttggccatctatagttatgggtagctttggacttgtgtgctaattaaagccacaaaacgagcgatggaaaaaacaatgtgaactgcatgagtgtagaaaaagaataaaaacaaaggtgagagaaaataagggtgtagattctaaactctctcgagtagtcgagtgaagattctctggttatttgcatgtcatctaaatagttataaaaaaaataaaaaagtgtacgacatgcggggcatatgctattaaaaaaagtgtagtgaactaaacacatacgttttataatgtaagactttctaacattatagatgttaatgaatctaggcatatgtatatctaatttcattaacatctatacaaaagtagacaatgctagaaagtcttacattataccacggaggaaatacctaataaattatggcacctaagattgtggcgtggtaaagtgtggtcaaacaccccatattaccagacatctagacctcagacattgcacattccccatcaaagttccaattcaaaatttgatgagttaaccgctctttacacacatgcaccgtacacaatattccatttgtacatttaatattttatagtttctacagaaatttatatctacaaaatttccgagaaaaatgatattgcacaattgcataaacattatattttacacaattataaacataatgttcggttttgagaaaaaaagtacttttcataaaaaaacacatgtcataacatttctaaatttatttatttgtgcttttgtgcacaaaaaataacaatatttccaataaaaacataacaacacaaggcaagctccgcaccgaccgcacgactgccggcattggatttgtatcactggcttcagatccgcaccgtgacacctcgccaccgccgtagtaaggcacgccgagctccacctaaattccggccaccatgcctcgccccctgcaagagtgaggtccgcgggatatgatttggggaaagacggaaggagagaaagagagagtgaggtgatagggatccgggaaggagggataagagagagagtgggctctatttatgtaaagttaaatcgtattcatacaatggaacccaccgtatgagagaaattattgcttttccacattaggtgcataaatcgtgatgcattgacagaggactgtgggaaatggcggcccggtggtatgtggtggacacaggtgagcaacgaggtgtcagcggtggcatggaagccacggggatggaggagagtggtgggccggtaagggcaaagcgaaggttctggttagaagacaggggctagcggtggcggatccgacggtagggaggcaccgaagacagggaagcaggcggggtgggaggacctcgccaccgtcagcttggggaagggggaggtgatggaggaggccagccaaggggcctcgtcggcgtcgttaatgccgcccggccaactggtgagaccgagcggtggtgaagaaggtggggcagatttctgatcacctgactcttgccctctcgtgtgctgtgcgatgatggcggggagggaggagaagagtaaggtgttagggttggaagtaatgctaacccaacagtctagaatttgccatatttaggagagtgttttctatcaaatgtcaaataaatagtcccatatactccctccgcccctaaatatttaacgccattgactttttaaaacatgtttgaccgttcgtcttattaaaaaactatatgtatacttttatgtatttaacaatgaatcaaatgataggaaaaaaattaataattacataaattttttaaataagacgaacggtcaaacatgtttaaaaagtcaacggcgtttcatatttagggacggagggagtatttaacaaacacttcataaatggtcacaataggatactaatccatgtcaaatatatccaccacaaacaatgaagttgatacaattgaaaactgaattttacagtcttacagattcaaatttaaattacactagtacgaagtagtatataactggtatagcgctgaccagctattgacagccacctagctatgactggatcacgacgacagccacgcgacttcatcgcggaagcacctccggaacctctccatccgctccggcgacaaagcgatgcctacctcaatctcaatgccgccggagcagccgccacggccctccgccaccgacatcgcgccggtcttcgccacggacacgatctccaccttcgccggactcccgaacccaaagtcgacgtcgtacacgcggaacctcggtgacccggccaccgacaacggccaggtcgtcacctctgccctgtgctccctgcacctgtcccagtagccttgatcatatcgcattccttcgtcgacggcggcggcgatcgcagcgcaggccgcgaataggccatccgcgccggttgcggcgatgtccattctgggcgccgacgcgaagcacgtgccgatgcagttcccgaggtacttgtccgggatgtggggttccatccgtgaccggagatcggtggcgaagacgaggtgggcacggcggccatggttccgaggctctgcttcgacgtcgccgcccgcgcctagtgcggcccggacatggcaccgccatatgacggcgaacgtcgcgacgatggacgtgcaccgcggaggcagcacgccgcggcgctgaccctgtccctgatgctctgcaggttttcccttgacagcgtgaatgtggtgaggagcttgctgtcgacgacgtcggggtcgggcgagttggtcgtcctcgtctttacatggtggatatcttcacgttcagggatggacgtgcggtcgatgacgggcggcggcggcgcctgagcagatggcggcccaggtgtggaggaagttcgtggagctcgagccgtcgcaggcggcgtggtgcacggtgacgccgagggcgaggccgcgcggcgccgccggccgcaacagcacggtggcctgcacggccagcaccgcgccgccatccgggagctccggcacgagcggctcaatcctggcaacctccctcgggtcatccgtggccagctcatcgacaccgacgccgtgtgctcggcgacggtgaaggcgatggcgtcgcctggctggtagaagagctcgtaccggttggccttgccgggcgtgcggcggaggcggacggtgagcgggtagaagacgtggagcgcgcgggctagggagtcgaccaacctggacagcgcaacgtcgacgtcacatgtggcaccgcctccgccgtcgccgaggcggtagaagaagacccgctcgacgggtggggcgatgagccacatcgcgtcgaggaaggtgacactagaacggataccctcatctcaatcgggcggtaagccccatctcaatcgggcacagcgtccgtcacaggctagaagtcactgatgtgaagagttatctcaatcgggcaaacggccgtcacgaatgaatatatctcaattgggccctaagtaaagcccgtcaccgatagctttgacccagacaaccagtcaaactatagcctgtcacagatgacctatctctatcgggtcacaactagcgcccgtcacagatgactactaacctttatcgggcctaaactagagcctgtcacagatgatactcatctcaatcgggcctaaactatagcccgtcatagatgactgatgacctcaatcgggcctaaactagagcccgtcacagatgactgctgacctcaatcgggcctaaactagagcccgtcacagatgactagtgacctcaatcgggcctaagctagagcccgtcacagatgacctcatctcagtcgggcatttagttatggcccgtcacagatgattataatccacaaaaaaaaattttgttttttggctagcctcaggcctttgctagccatgcccgctgcaaaaatgacagaaacaaacacagatatccaatatccccagctccccagcatcacccattcatacatatgcattaacatacacagacatcaatatatttcacacaaccacacattcacagccatatcatatttcacatccattcacatatttcacatccattcaaatatttatcatatttcacctgcaaaaccgagttaattggatcaaatatttatttagcaagtcttaacataaacatatgaaatatatacataaatataagcatcacagttacatcaccacagttgcataataagtgttcatcattgcctaaacatagaagttcaacattgttcatcattttagtttaagcctaaacattcctttggggttaattatttcgtggaggatgaagctggctatctcctcgcgaacctcctcaaagctggtagtcagagacttggttattgtgccctacattgtcataattccagattatgccatcgatcatatataagtactaaaatgtagttagtctatcacaattgagaccaccgacctcaaactcagccaaagtcttcaccttttctctatacagaagtcacatgttgtggcacacatggaatccgcactggtcacctatttgttgcttcaccgggaagtcttttttgtggatgagggtgtcatgtcctgtcttcctgaggcctcctctttgcacgtattgggcccacgcttcatctatcgctagttgaattggggtccaatcatatgcgttcttatcaattctagagttcaggtaatgacatgtactccatttatgtgttatgaccagaaggatccaataggcactgcggcattaatatagtgaaagttaattaagtactcaaggaatgtgtcatgctgttgtgtatatttagttaacacacttactattgattataggcacacataatgtacttcttgtctcggcgggaccacaatgtgtcgtagatgtagttgaccattccttgacggtcattctggagatttgtgacagtgaccacttgtggatcaaggaaggcaacttccggtgcatgcttctgacaccattgccaacttaacctacacacaggatcaatgatcttgtaagcaagttaaatcgattgttattaccagaatgagttgggcgacaatacttacaaggagtaacacttaaggaggcttgtgtccaccgctcggagcctgtagaggtcgaaaagatccttgaagtcgaccacgatataatttgttggaccaaggaatgactttccatcgtgctgtccaagaatatcggtagctttacttggcttcctggcgttagatttctccatgtagtataagtgaaggtccttacaagtggtgcccattgcagcaagcacgtcatctccaaccaatggcatgcctagttggaactcctgtggagcgacgtatttcttcttgacctctttgcccttagtctcttcctggcccttgcccagatctagctttcttggagctagaagcgaggcctgcacctttcctccccttcctctcccctttgcttcgggtttatcgagagtaattctctgaggggaagagtgtgccttcctgctcttcttcatcggtgggggtttatgaatcgccttgctgtcggcctccattcggtcctccccaaaatccgcgtcgtactgcaactgcacatcgtaagattgtgcatgacgatcttgagcaggaggggctgaaggagcagaggcgggtctctttggtggacgaccgcctggtgcagtggttggcctcgctgtaaccctgatctcaatgaggtccttgggccattggatgaaggtaccacgagcatttcctagtgagaggacctcgtcgttcggtggatacttcagagggaacagctcgtattcgggcttcaccgagtcaacttgaacttttgcacagtcggccctgagttgcgctccatgcactgttgtctctggggtcggcttgtacgcaagtccctcggctgctagaacagtgaaggtcggcatcaccctaactgtgagggtgcagctcgttggttcctgcgatagattaatcaatttttttagaatactatatatcatatggattcgttacgtctttcatgtattgagtaagttcacggttaccgttatgtggtcgacggcgctgtcgatcgatgttggattttccgccaactcagttgatgcgcaactgctgcatttttcggtgggacttcctaactctttgtgcgcagcagcagcggcggcctgggggatctgttgctcttctcggatctcttgcctaatcttggccctcatcgactcgagcttttcgtcgaattcagatgtcagctcagctcgtatcgactcccggatcttggcttcaaggcgtgcatctttctccgccttgttggaagtccgcttcttgtactgccacgcgtagtctggaaatccatacttccagggaacagaagacccaacgccccgtgtccgtccacggtgttccttgttgcccaacgctttcgtgaggaggtcgtcctcgcgtctttgagagcaggcctcttgcgaggcttgttgctcggcaaccaactccttctgcattacaacttagtggggtcaaataaactgcatgatgggaaacaatgtgaacatctagtttgattagacacttactatagcttcatatactcgttgatcttctgcattttgcatgaagattgtgccatcatcatgtttctggtacctagccttggcccagttcctagcccgagggtgtgggatatcgccaaacacgagcggtgtgcacgattcctccgcttcttcatcctcacgctgccattcctcttccttaccggcatatccgacggtactaagccggtgcggatgctggttcctggtctggagcaagcgatatgcctcgcttctagctctggactcgggggtcgacttcttcgcatagaattcctcccatacctgttccgtgatccaaggaaatttctctcttggatctggatttgccgggttgtaaacgaactcgccgactagcttagtcttgaagttcttccgagcagtgcccataaccttgaaagcagcccgcctgatacggtcctcatgctccgcaggataatcaaagctctccttgaacgttagccaagcaatgtccttctctgcggccgacacgagcttgaagtcgtcttgcagaatactgaatttctgcctccctatgacctcgcagatagacctaaatcggctcaatattttccttggagatgtcggcaaccctacggcgtccaccactgttatgcggaaccgttccttaggaattttattccctgtcctaggagtacgtgcccttgaggacccactagttgttgtcgacattggttcgccttgctgagacattgtctactttttttccaaaaaaacacaattgagtgctacaatctattacaatctatttaccacatttcacaataatttcattaatgcaccacatttcatcccaacataaataaaccacatttcatcccaacatgaataaaccacatttcatcccaacatgaataaaccacatttcatcccaacataaataaaccacatttcatcccaacatgaaccatattgcatataaataaagttaaatgaaccacatttcatcaatcactacaatcatctatcacaacatgaataaatgcaccacatttcatcccaacatcgacatgtctcactcacagttcaatcacatatgatccacatccacatttcaatgacatgtcattcacagttagcagagggcggcgcgatggaggactcacctgaggatggccgatggggctcggtggcggcggcgcccgggctcggtggagggcggcgctggtcggtggagacgccgatcgggtaggtcggcaccaggcaggcggcgtcgtgctcggtgagggtcggcgacgtgggtcggtgaggacgcgggcggcgacgacgaggaaggccaacaccggtccggtcggtgtaaaggctcggtggcggcggcggcgggctcgggggggggggggggtcgtcggtgaggaggctcggtggcggaggtccgaatggagggccgaggaggctcagtggtgacggcggcaggcttggcgagggaggacgattgcggcggcggcgggctcggtggcgacggcggcgggcttggtgagggaggatgacagcaacgctagggttctaaggaggtgggaaactgtagcgggacttagaaaaattttcgatccgatctgagaaaccctagttatattagagtgatgagtcatctcaatcgggctttgccgtagagcccgtcagagatgactcatcggtgacgggctccatactaatgcccgattgagatgacattcaggcccgtcacggatgactcatccgtgacgggccctaagataatgcccgatagagatcgattaatctctatcgggcttgaactaaggcccgtcaccgatgactatttttccatttcccagataagtctttatatttgtgagtacaaaatatatagctgctgtataataatttattttattagtcataacacatttttggatagtaaatgatttcaaatcgaaatatggtcaacaacaaaattgatcctctcatcaagatctacaacttttattttggtcatttgtctatataactttgtttccaacagcttgaaattgattttgacaatatgacaaatgtaaacagcatttgtaaatattacatgactgtagatcaaggcgcgcgttcaacccgtcctttgtcttcccgagaatattcaacatcaggccaaccaaactctcacacacattcttttctacatgcatgagatcaatgcaatgatggacatcaagatctttccagtaaggtagccgccaaaatatggattttttcttccacatacccttctcctttgtcttgttacgtttacttttcttcccaaactcattgcttatgtccttgaccatattgtggacctcatctccggacaaatctttgggagcaggctgaagttctctcttaccattaaaaattttcttctttcttctaaatgtgtgacgtagcgggagccacctccggtgacccatgtataccatctttcgtgatttcttcagccaccggctttgtgtatgttccttgcaatcggagcatgccttctttccttttatagtttgtccggaaatattaccgagtgtagggtagtcattaatggtgcagaacaatagaactcttagcttgaagttctcctgaccatatgtatcccaagtttccacaccttctttccaaagaatctccagatcgtcgataataggctccaggaatacatcgatatcattgccgggttgccttggaccttggattaacaagcataacataatatatttccgtttaaagcataaccatggcgggaggttatagttcgcaataagaactagccaagtgctgtgagtactactcatgtcaccgaaaggattcatgccatccgtacaaagacatatcctcatgtttctagggtcggcagcaaagtctttgtgttttcgatctatattccttcattcaatcgaatccgctgggtgtctaagcataccatcattccttctttccgtggcgtgccaacgtactaacttcgcttcgttcgggttggcaaagattctcttgaaacgatcaatgataggtagataccacacaacctttgccggaccacccctctttgacttatttccttcgtcagcacttttctttcgcttgtatcgagaagccttgcagacaggaaagcatccaagtccgcatattgcttgtggtacaatatgcagtcgttgggacaagcgtgaattctacggacctctaaccccagtggacacagaacctgctttgcttcgtatgtcgtctcgggcaatgtattctcaacaggaagcatagccttcaaaattcctaaaagatctgtgaaactcttgtctgtccatccactacttgccttcagcttcattaggtccaaggtaattgacaacttagtgtgttttgctttgcatccagcgtacaaaggcgtctcggaatcacttaccaacctgctgaatttcattccatctctctcattctaggctaggtcctcaacgtcatgtaacatgtcttgcagcagatcgtgatccacatcaaccatttcaccgcccaatggagaaggtataaacatgtcatgctcattttcatcttcctgattatgcacaccacttctgtctgctgctgctccacttcctgattattgctctccatgcttcacccaacatgtatagccctccatgaatcctcgttgtatcagatgaccgtgtatgtcctctccgctatcaaacatattctcgttcttgcaatctgcacatggacaacacatgtaatcactgtttcttcttatccgattctcctccgcggcgttcataaaatttattacgccctttcggtactatgtagaatgacgtttcaaatttttggcatacatccaacttcgatcgattgctaaaaaaaaacaaattagagacacatattataagatcagtattgcaaaagtaaaagtaagacgtgatgaaattgctcaattaatgatttatattactcacttgattgatccattttgatcacttttgggaatttaatttctgttttccttggaaaaaggacaaaaaatcgccccctatagcctcccaccaaaatagtgaacagtgggatacagttacactaggtggttgggggtatttatactatgcaacaaatatctgtaacggctctaaaacaatcaaccgtgacgggcatacaagtactctctatcgggccttaataaaaggccgtcaaaaaagagtgtcatcgggtcatctgtgacgggcttcttttagggcccgattaagatatggaaccctcatctcaatcgggcctcaactatagcccgtcacagataagtgtcatccgtgacgggctttagttttatgccgatataccatagctgtgcgaccatatctcaatcaggcgaaacttcggcctgattgagattacttccttgtgacggcccgcaaattccattcttgttatgggccgttacagatggaaggatctgtactagtgtgagcggcagagtggcctccggctgcgggttgcagccggcaccggccgcaggcgacgacggcgcgacgcgagcggtgcgcacgacgcggaagctgccgccgtgagctggtggcgacgccattgcagtacgtcgggcgcggcgcgcgtgtcggctgatcgaggtctctggattctggatggctagcgacgtcatgtgcgcgcgtgggcgataacaaaaactatcataaaagtcacttcaaatttgacatttcaccccacaaattattttgttgcaaatcatcatctctactcggttttgttttgaaaaaccaccccagtgcacatgtgtttatccaaatcaatatgtctttataaattgcaagccatcaatatggttcttatcaaaatttacctttaggagtatagactttaacactttttgtgagatttgataaatagaattattgatgagagtttaaacgttgtttctctatatgcagaaaaagatttcagtgacacataaaaaataaatctaatgcaaacatcagaaattttttttgaagcggctagcttaacctacggtggctctatatcagcgataacggggtgattcggttaagcatttacgctgggtgttaaatatttacagtaaaataacttatgaaatcgaatatcaaactcaagtgatttttagaatgatttctattatttcccataatttatactaaggagctttagttcaattgtgacaggacctccgctttttcttattatcctccagggctcatatatgcttgcgcagacgaaacttgtcttgtgttagatggttgaaagtaatatattcaggagagccaaccagactagagacaacacatcaagcaacacaactaaaaaattagcgcgcctctaacgtgttcactacttaaatcctgcgtatcagcttatggccttttttatatacaggttggtgaatgattaattgttttaaaaaatataatgaaaaaaattcagcatgtaacaaactgatcaaatcacccccagatcatgcaatcaactactcctccgtcacaaaatataaaacctatgacctaattggacatttcctactatgattttttgtggccgtcgtgctttgttcttttaacacatgggctgtgaagcccacagcattcctgggctgtagtcatgtatgcatggcatgggcccatgcctcgcttcacatgatgggcactgagagaacgggagatcgagagcattagtttcttcagtaaaaacgtattctgaataaaccgaacagattttgttcggtattttttccttgatttttattttactagcaaaatgcccttgcattgccactggtgaggataaagaatcaatcacaagaaacaagatagtgatatggtgaatttgactatttggcagagacaacatatttagagtcagagacaatataattagggttgattgagtacaaatccttgaacattttgtgtaaagattcctttggttaactgaagtttccgttatttttggacaaatggtttatctgatacgattgtgaagctgcagaaaaggcaaacatttacggtatgaggtcatgcatctgaggtatccggattaaacctaggcaaaacttgctacaggatactgaaaaaatatgtaattggctaggagacaccgtaaaaacgttacacggctgatggacactccaaaaaagacaccggagacaatattttataatttccgggtcaaaagaggtgataattttttgcaaatggtgagattgcccctgccatggaacgctgccgccgcctcacacaaggccacctcctgctcgcgctccaagccaccgccgtggcctccaccggtctgcacgcggctgcttcctgctcgtgctccacgttgtcgccgtggccaccgctggccctgcatgtggccgcctcctgcttgatgggcgacgcatcgatccatcatggtgggtgaagacggaggctatcacttcttggcgtcggcagcttcgagaactctccctcatgccgcctccagcttgcgctcctccactgcaatctcctcctcctcctgccggaatcatccgcccacaccgacctcttcgaccccatcctctctgcggtcgagtgcgcctctgcggcagcgctgggcttctctgtgccgtgccaggtgtcaatgacggttgctgccaccgcgccgacgagcccaccctcttctacatgccacactacgaggcgtcgctctacgatgccttctttgccgtcaactgggagccacccttgctgctccgccatgtttgcgtgctgggtaacaacttccacaactacgtgatccaggcggaggagaacagatcaggccccgccgccaaggccaagctcatcctcacggcattgcagttctcgggtaggggaagatggcaccaggggcaatctcgccatttgaaaaaaatatcacctcttttggcccgtaattataaaatattgtcttctgtgtcttatagccaattacataatttttggagtgtccatcagtcgtgtcacatttttgctgtgtctcctagccaattacacattctttgattgtactgtagcaaattttgccttgaaacaaaggaaaaacatagaaatttcaaaggattaataccctacaggaaataatcctacgaaaccccttgaaggggtttcaatggattgattcatatcaattccttttaaattcatatggaatagattattgtagacgaattttaaaggaaaataagcatgaggttttacctaatgttttatttttcccgtatgttgaattcctacgtttttatgtgtgactatcaaacgacagtttttctatgttttcaaattgaggaattcaatgaacatgatattatattcttatgtttttctagtcttacgttttgacaaatgacaatcctatgttttaagggttaatttgctccgtgccattgcaaatttgtctactcagataaatatcactacaatttatctatttatagccgtgccactcaaattttacaaaattaaaatcataccattgccgtcacgttttctatcttctcctccatctaagcattgggttcactcatcagttttatattcttcctccgtcctcccctcttctcttcctatctgtccaccacttctcaaccttctctccaccaatccatctctccccgtgccggagtgcgcagctaatggcagccaccgcccaaccgtgctcacgcgtgggagcagagggctcctcgacaagccatctcgagaggctggactccaggttgcccacgagcatggtgtcgcgccaaggctctcagagatgggcaaaaagagaagaggggaggatgaaagaagatgatgaatttgatggctggacctcacgtgcaaatgggaaagaagatgaaaaacgtgacgtgacagcgatagtatggtttcaattttataaaatttaagtggcacggctacatatagcaaattgtaatgacatttatctgtataaacacatttattatggtatgaatcaaattaacccatttattatggtatgaatcaaattaacccatgttttgaaggtccttgggaaagaacgagatcgcaaaaattatcagcctgctacgtatacactatatacagcacatgttttggtatggtgttcatctagactgaaacaataatgtgcgattttaccaatgtgcggagaaatgcttatatgtgacgttaaaacagtacttagggaaaaatgctaattattgaccgtataaaactgcaatatatcaacagtgaacgaaccattaattacataactaattgatgtcctagacgttgcttcggaatgaatggaaaatatatgttgcatattatactagtaaaaatgatgggaagatatatgttgaaatattaagaaaataacgtgtggaggatgattaaaaatgctcgtatgcatgctaaactctagattataataacgtagatgatctcccgtgttttgttgcaggatatatgttatatattggagaaataataaaatgatttggattgaaacattatgaaaatgatttgagaacgatgatgtagcatatgtatgctagatttagaatgaaataaattttagatataattactatatccttacatattgagcttcgtgtgtctaatgggttgatgtgtcatgcttgcatgtaagttttaggagtgctaataaatactatgcttgtatgttgaattttagatgtttagttgatattagattgatagaaagaagggattatgaatgatatgttattcttgcataagctttaatatgcagtggaataatactccctccgtcctaagagagtattgtccagggtaaaaagacgtgttctcttctcagggtgtatggcactgctaaaaaatttgactttagaggtaaccaaaatcaatttttgctggcaatcatgatgaccgcctgcgactgaacgcctatgacagtccatgatttgtaagcgaatatggtccgcttgggaaaatcgattgtaatagatgaaaaccttaaccacctgtacggaggatttccggagaaaaacaaaacaatattcaaattcttgaatcgttcgtgcaagaaacgttctagatcggcatcaatatcatccaaattttttttagagaaaaggtcagagactcggctttttactgaaagccacatcgaagtgttcagctggggttgccagcgacaaagaggagttcaagaaaatacagaccaggaacagcaaccagactggcgaacaagtagcgaacgatctagattccagccgaaactctaagctgacaacgacatgagccagggaaacatctacctgggaaacaaaaactctaacgactaagcaacagaacgatagaattttaacccacacccattcttggagatcttagactagtcgacaccatcttgatcctgtactccagccttcaggacgaaagagcttcttccactgcagcaaatttgcaacaatttgaaaagttagagacagggggaaatacaacaatttatctctaaacaccatattatttttggttagccacaaattccagcacacagcagcaagtaggctaagatgcaatctaatcgaagtaggggaattatcactgtcacaaagcaaaaagaactcgtccaaactcctaggaataacgttccagcctaagccatctctgcaaatacaccagataagtctagccataacgcaattaaacaagatgtgattggtagtttccaaatgtccacaaagctgacagaactctgaatcattccagcctcttttttttttaagttgttccgcagactgaattctatctctaatggctagccagagaaagtgtttaatcttcatgggaaaggggcttttccacatctcagtattcacctctcttatacccctaaaggtcagggtcctgtacatagatttggtggtatatttcttgttagtagctaggccccaaagtaaagtgtcaggaacaggggaagtctccagattatcaattactttcttgagttcctcccattcagttatttcagctggaccaaaagatcttctgaaagagagacaatcagtgccctcactagcaatctattagacagccacctcttgttggttacagatagcaaataaggatggaaatctaatttttagagagcaattgtccacccaagtatctttccaaaaatagatatgtgagccctcaccaactttccattcagcacccaaaatcacccattttctaatattaagcaaacctctccaaaattgggagccaacaccatttttcacctggaacacacctccttcttgtaagtatttcctctttaacacctctaaacacaagctcaatatcatccaaatcaaaatataaattcatgcagatgggacaacagctcatgagaaccatcaaaacacggcggcctccgacagcatccagatcgtgatcgtcgtggtcatcatctccctcattgcaactgcctccgtcactcccccgagcacagccgccacagctctcccgagctaccatcgcccaagcgcaggagacgaccaggcacaacggcctgtatccacccgatggtgtcatcatggactcaaggtcgaccttgccgagcagtaaccctacagctgttggatccggcaccctcaacgcttgcctccaccagatccaacgctcaccggccccgtcactgctgtatcctatgttagagaaaatggattaggcctaatttattcctaatgaattttataggcccacaattaatgttaagagattaatgtcaccttaaaaatttatgtggaaggtttcaacttaactaggttgctattggagagcacttgttaaccggtagaggtggtagtgggactaccacatgcgcaccgagccggctggggaatcaaatcattcccggattgattgattccgttattactccaataacagagacacactatgcaaacccatcaccggatgaacgaatcaatcccggattgattccacctctcttcgcgcaccggctcctcctcggtgtctacatcttttcttcttctgttcctgcgctgcacctctgcttccccggttcaaagcacttgcatgaacaagtgtttaggataaacaggtctcccgaactcagctcgcttgagtacctacatgggtatgcgggcgtttaagtttttggggagcgcttcctagcgcaactgctctgctgcatcggttctgcacggcgtcgtcttcttcgtctacttcctctacatcgctatgtctactggaggaggtaatggtagaggcattggtagtaacgacgctcctagaggtggcggcaatggcgctcctggaggcaacgtcactggagaaggcgagaacgtcaacatcaacggaggcaacaacaccatcaatgcattatccagtaccgaagcgttatccgggtatgttacatttttaactattgtgtgttaaacatgtgtttctctatgatgcttttctagtcattagcatgttcatgtttagcactttttctagatcaattcctgctacacatgtcatgtttattgtcttaatttttaggattaaaatatgactatattttccacgtgctccaccttctctgtttcactgtcatcgctgccctcatgtcgatgttgagctggagccggaatgccggatccaccacgtccccggtgtgggaggacacatcgagaagtgggggctggtgagtggtaactaggagataggttcattaatttttttttcaaagtggcctcctcttttccaggtggttggttaggttagggcaagtactatgggcatccaagcacaaacctcaagatgccacataggactatatagtgaggtggaggagagaagaaagatgagagagaaatagtcacatctcatgcaaggggcaacccctacacaaactttaataaacatgtgagagtgttagagatattggggattgtgtggtagaggcaacctattatacatgtcacctcttaatttaattatgtatatcatgtataaaattggatgtgatggtcacctctactataaaacttgcccttaggaggtccactcgtaaaatagaattatttttctggctgtggcctcctaaaccgacaatctgtaaaaattaattctcatacagttgtgaccacatactcccagtatgcttttgtctgtgtttagttcttgaaaaaagttgaaagtttggggaaagttggtagtttggaaaaaaagttgagagtttatatgtgtaggaaaattttagatgtgatgtgatgtgatggaaagttagaaattgggggtgaactaaacacggcctttgttaagtccatcgttgagaataaaatggagtgtcatgaaaaatgtatttttttatagtagtgtgtgagatgtaggcattgactgcttggagccatcataaagacaagaggtagttgggacttgggaaagacaagaggtagttgggacttgggactagtgtgagagatgtgaccaatttttgtattttgagttttaagtgacagtggattcaaactatatatctcagagagatatagataagtactaatctacaacaatctattattacaaacaattatagccacaatgaaaaaaattatttatatacatgataagagatatatttttcgacgtgatagttaagtggctgcaagtagctagggcgaatcaatatacaaggggagtatgctttattttataattttctgccccttgtaatatctttatcaatttaagttgaacagttagtgatttttctagatatctactccctccgtcctataaaaaaccaacttagtactggatgtgacacatcctagtactacgaatctgaatatacatttgtctagttttattatactataatgtgccacatttcgttctagattcgtcatttcgttctagattcgttttttgggacggattataccgttgaactattgagtgagtataaattatctccatataccgaaaaccagaaatatttcaccctgagctattaatactagacgaattacctccctaagacaaaccagagtggttttggttctacaaggcagtccagtcatcagtttttttatcaacgagcccacctgtcagctctcaccctctatcttttccccctcctctctatatctctctttcccaaatcatctctcttctccctcccctcacctccatctctctctatcactaaatggggagtgccggacggcggcgagttaggggcggagcgatgtgacaacaacgagggtggacggcaggacggcaactggcgaggacagtgggacagcggcgggggtggacgcagttcggggcggcgcgatggcgatggcggaggccgcttagggcatcgaggatagcggtggatggtgttgggcgagggcagcgggacgacagagggggcagaggcagctcggggtggcgggcggtagcgaaggccgcttgggcgctgagggcagcagcaaatggcggcaagcgagggcgggggtacggcggggaggggggtatggaggcagctcggggtgggcaggatggtggcgggaggtagcgaaggctactcggggagggcggatggcggcgcggtggcggcgtggctaaggcaacttggggcggcaagtgagcgccgtcaggatggtgcagtgctgccggcacgtgcctcatcctcgtcgttggcatccgtgcgcgcgagagagaggtgtgagaggggaaagagagagaggtgagagatctgacgggtgggccccatcgattatttgataaaagaattgttgactgaactaccacgtaggaccaaaaccgctctcaaagctatttgaggggggttttcatccaatattaatagttgagggtgaaagttatcttatttttgagtttaaggggtaattcgtactcacctaataacttaggggcataattcgagtatggaccagtgaagtgaagtcactcgcggagatgcaagtattataggagtagaagcaaagctcgatcgctctgcagctagccacgagcacacaaccctgacctgttctgcggcgagaccatggcgtcgcaaccggccgctcacgccgctggcctccgcgtcctccgcacaacgcgcgtcgcgccagcgccgcccgccggcgagccctcgctgcccgagcgagccctgcctctcatcttcatggacgcggggtggctccacgcccagcccgtcgagcgcgtcttcttctaccgcctcggcccctgcgacgacgacgatgtcgacgctgtgctgtcccggatggaggagtcgctaccccgggcgatccacgccttctacccgctcgccggccgcgtccgcccaacgcccggcgagaccaaccggtacgagctcctctaccagcccggcgacggcgtggcgttcactgtcgccgagcacgacggcgtcggagtcggcgtcgacgagctcgccacggacgagccgagggagctcgccaagatcgcgtcgttcgtcccggagcttcccgagggcggcgcggtgctcgcgctgcaggtgaccgtgctgccgcccaaccgccgtggtctcgctgtcggcatcatcgtccaccactccgcctgcgacggggtgggctcgacgcacttcctccacacctgggccgctgcctgcgccggcgaccggatgctcccagagccgcctgtgatcgaccgcacgctcatccgtgacctaccgaacatgcacgacgagatcacctcatccacgaacgaagccaaagatctgttcaaagcgcccgacgccggcaagctcctcgacgtcctcgccactttcaccctgtccaaagagctcctgcagggcgtcaaggacgccgtcgccagcgaggccgcacgtcgcggcgtgccgccgcctcggtgcacgtcccacgtggccatgtacggcctcatgtggcactgctaccgccgggccagacgggacgacggcggccgtgccgccgccgccgcccatttcatcttcgccgtcgaccaccggtcgcggctggtgccccgcgtccccgacaactacctcggcaactgcgtcggcccgggcttcgcctcggcgcccgaggaggagctcgccgtcgccgacgccgcgggcggcgtcttcacggcctgcgccacggtcgccgccgccatcgacgaggcggtgcgcggcgagctcgcgtactgggaggggtggacggagcgcgtcgtggaggcgtgcagggacgacgcgccgttctctgtggccgggtcgacgaggttccgcgtgtacgacgtcgacttcgggttcgggaggccggcgaaggtggagatcgtgtccgtggcgaagaccggcgcggtgtcggtggcggaggatcgttccggcgccggcggcatcgaggttggcatagctctgccgccggagcgcatggacaggttccggagatgcctcgccgacgccattgcttggctttcctcgtcttcccaatgcaactatcgtgggaaaactgcagtacgtggagtagatttcatcagagattcggttttcatgtctgtttgctggcttatactctctctctctaaaaaataataataataaaccctagggatggatcggcacatgtacttagattcattcgatcaattcttttttaaggacggaaggagtaagtcgaaataaaatttaaaactttttaatttaattttagtgattgtattttcatcccttctggagtacttttaaactgctggtaataattatttacataaaaattatttttgctgccttgttaatttttttatagcttattttgttgctcaaccgatcagacaattttgaatggcatttcatttgaaagtggattttaaactctcaaggggatgtcttttcattgtttgcatgacacttagaatagttataaaattattataaaaattgagaagatgtattaacatgagatatatcgctttagaaacatgtaaggtaaaattctacttttataagttgcaataagaaaaaataaattaaagatagttaacgtatattcagagtcaatttttttttgcaacgtgttaaagtgagaaatttaacttgcatgtctgtagagggatctaacacatattaatctatattattaatttctttttcaaatttttcatagtcatttgagtgacatacaacaatgagtggatgtcaccttgagagtttagaatagtatcactattttatttgtcctaggatgtgttcttaactcaaggttcccaacatcaattctctcattacccacacgcacgaatcctgaactactaaacataatgtttatttaaaaaaattctttagaaaaagatgctgtaaaaaatcatatcaatttaatttttaaactattgtgttaatacttaattaattatgtattattttgtcattttgttttacgtgtgaaggggagagatttccaaaccaatccaaatggacacaccctaaatgtaaagaagtgagtttcgtgttgggattttactccagcatagctcaagctactcccttcgttcggattagatacatataacaaatttggataagtttgtttaaattgttgtactaaaatatattccatcccgttctaacttgtaatattttgagacaggactagtacatggtaagcttggtaatatgcaagaccaatatatatatttatttatgcttatgcttctaatactacgtcctttaaatacttgtaagctattgtatttgtatttactgctacatctgttttaaaatatataacttttacttacgaatctggttttaaatttttatattttagatagaaggaataatgtttatgattagcaaatgataaatcggcaaatgtatatgtcagaacactaaaattcgtaaaggaaatatgaataagccaaagctcttaatgagtttattaacccgcttgagttaacttgcgagccagaaccaacctagacttttagcgcactatattaagccgagcctagcaacttgtgttgatgtaaaaacacgaggcctgaaagatctgcttaacttcagtgcaggtccaaaaatcttgtctttagatttgtgagcatgccagttgatttgatcctgcaatcaacaagaaataaagacaaagaaaccgcggttaaatccataaacaatagccgatcggctagttgccgatgacgtatcatttatctttgagccgatgtcatatgtaaatcgatcggcagtcatgaataagtaagaaaggactaaatctactcgatcggctgtagacattaacaatatataatccttatatcgatatatacttaaatcaagtgattgggatagatcggtcgccatactgagacagtataaatcacttagatcgaaatatgtattaacaacaagactacatatgtttataacatagctgatcatatatatctagcgtgtatcggctaatactccgatactactctatattaagataccaaagcaagtagaatataccaaacgaaagtctaatatacttaaatgcaacaagatcttaatataaagggtagatttaacatgtcaatcaagcatacaagataaaagtagttatatcaggtaaaatcggctgaaaccccgatgctcctctaatcggcaaccaaaagcaggctagagatcgagattctaatcacgacttataagatcaaactcaactgatgcagctataagtatgaaaagaaggataatatctagacaatcaagccgttggatctttcatagagtggtagatatcctatataatctaggtcaacgtcggtatttaacctgatcggctgtcttctggtaacagacgttagccgattgaaggttaaatagcgatattgccagagattatataagatatatgataactcgacgaattacataaatgagattagagtatcataaagatggaagcactaatcccgagaacgcaagccgccataagaagttttacctctagttgaagatcgaatccgatgcagctcaacccgaaagcaagaactcgtcgaaacaaaacgaaagtaaagggtggcgatgcgccgagattatattgagcgtgtgttagattgattacatggggctcggggtctatttatacccgatattacaaaaaatgtccatgtcacacacgactcttatctctaacaaactctaagataccataagtctttgcggcagacttttgtccaaacatatctctaaggaaattacatgaaatatcctaattaatagatacaattgccttctcaggactcaatccatgcgtggcaatcctcatgaagcacgttaactcaacccaacaacgtatgccgtgtcacattgtcggattcggctaaccttgtccgactcgaactctgccaattaaagccacaaccaattcggacttagccgattcccactctgtttcctggacgatctctattttagattccgcttcagtctaatctccatctccgatgacgattaccgaatttggtcgttaacaacttgttatgatactgagcttagctagtacaagccttaacagttactcctccctctattctagaataacttcgtgtattcaatataggagggtaattcggtcgaccgtgatagtttagagggtattatatactttttccttttagtaatcattgtatcaaaatttataaaatcacaagataaatatattagaaataggtaaaaagagataattgtatgaggatttgataaagtatggcaatgttattttttttattttgtgttgatatgtatgacataagtgaaaaatgtcctataataatttttttaagatcctttcatttatttaaaataagtttatttttagagtaatataattattgcaccagagtttataaagatagagaataattatattaggagtagacactactagaaaaatgagtttttccaggcagtccgaacgtgttttcacatgcggctcagctcctcaccatctattaaaggctagtgaaaatcaacatcttcacaggcgaaccttcaccacttgcgcaaatcaattttcagaagcggctaggttaacccgaccgccagcgagtaattaaggagagggtgtgtggccgggagggagaggagggtattttaaggattttttttaggcagacagtgctcttaacctgccgcttgtgaaatttaatcttcacggccgatatgttaagttgtctgcctgtgaaattctagatatttttgctggcggctctcttaaccttggaccgtaactcccttcccctcgttacattttcactggcggtggttgtgtatagccgcttaagaaaaaagtaggttgatgctatgaaaaattgattttcgtagcagtgagataaagtaagaaatagttgcattgtgatttaataaagtatgatattttagtttattttattttatattgttatgcatgagatgagtgaaaaataaatttatttcggacagaagtagcaggtgatagccatcgtcggtattttcgaatcagggatatgttggccaattttagttcccaaaataaaaaattttaagctgtcacatcgaatatccctatcaaatctaattaaaatccggatcaaatctaattaaaatccgggtagattggttaaagaaaatctgttcagttgagctaggttaccagagaaaattaaatttgacgatatgcagatattttccgagcgccatcattctgagctgcagcaggggcatgtgaactgagcgggtgtatgagcctcacgaatgatggcgcttggaaaataaggagctgtttagttcgcgaaataaaatattttaggttttatcggatattggaaatgttttttttttacacgaatgaaaaaactaattttataactcgtctgaaaaccgcgagacgaatcttttgagcctaattaatctgtcattagcatatataggttattgtagcacttatggttaatcatggactaattagactcaaaaattcgtctcgtgatttctcccctaactgtgtaattaatttttttaatctatatttaatactttatgcacgtgtccaaaaattcgatatagtgtttttgaaaaaactttcctaatgcttgcgtgccccacccacgatggaacccgatggaactacacccaacaaaaattatcaatctgttaccccctccaatcaaaaatagggttaatttgatccatgccactataaatctagctattaaaaaaataccattataattcatctattaataaccatgccacttgaattttacgaaattagcaccataccataccgtcacattttccatccatcccccatcttttccgtcttcttccttccttctcccatcatcttcccggagtcaagccggagagggagcttgccggcaaggtaacctcgagcgcagtcgagcgcagcgtggatgctagcgttggtctcctgcagggcgtggtcgagcaacgcagctgggtgtcgagtgtgaccagctgctctcttcttccccatcgtggcgggcctctccgaccgcctcctcgccgcctcgaagaggtcctggaggtcgagcagcgcctcgtcgagagggccctcgaagcgcatctcctccgcctccgcctcatacaccgcgcgcagcgccgccgccaccgcatcggtcagccgccgcacgcaactgcggccgatggccttggtttggccgaggaaacccacgacctcctccaccctcctcacggcctcgtccccacgcgccaccgcctcctcgatggcgtcgcacagctggtccacgtggccgacgaaccccaccgcgccatcagcgtacgcagggtccgccgggagcgcctccgcggcttccttggtgagcgcggacacgcggcggaacgccgctaggaggagctccgccggcgcgatggcgcggtcgatgcgcgcgcaccaccgcctgggactagaactgggaggacgacggcaagcagcaagagcacctcgccgctgtcttcgagtcttcgtcgccgccgcaccaccgcctcgatggtgtcgcgcagctggtccacgcggccgacgaaccccgccacgcactcggcgtccgccgggtccgccgggagcgccgccgcagcttcctcggcgagcacggacacgcggcggaacgccgctaggaggagctccgccggcgcgacggcgtggtagatgcgggcgcgcagggcgcgcactgtcaccgcctgggactgcagctgagaggacgacggcaagcagcaggagcacctcgccgccgtcttcgagtcttcgtcgccgccgtcgggtatgctcacgccgtgccgtgccgacgcttgctccaccgcagaagatgggagaaggaagtaggaagacggaaaaggtggggatggatggaaaacgttatggtagttacacggttctaatttcataaaaattcagtagagcgaatagtggtattttttttaatagccaaatttaaatttacagtggcatggatcacattaacaaaaaaaataatgtgcaattttaccatgcccaaaaaattttatattcgatgttaaggctaatcactgatagtagtacaaaactgcaatatcttgaacggtgaacgagtcatcatacaagtactaggatctattttagatttaagactacttaagctacttcatcggtttgtccgattatcataaattcccgctttttctatactgataatgaagacgtaaaagtctgctgacattgaaaacaacaatatttatatttatataagagcaagtataatagtgagagctttcaagggcgttggctctcatgcaagagctgatttagagcaagtataatagagagctataagaaagctgaatgctgaggtggatgatagaggagaggagagagatgtgaagcgggctgttagtttacagccggcttatgcatgaagagttaaccactatatgagtgagcacatatgctataaagatctatacagtaagcaattggctgtattattatccttgctctatatagtatagccaattactagctccaaatcaattaatagtcaattcatataatatttaactataaatatatatactacatcattaataattgctcccacctttcatacaggcacaaccttttgaagtctatgctgtaactggttacaaatctgtagtccgcttctcttctatatgttctatctcttacacgtaagtctgtagttgtcttatagtctattattgggtctgttcagctacaaaggctgcagcagtgttgaagcctgcagtgaagcaagcgaaaaaaaaagcagcggctagtcgcaggcagctactgtacctggcaggcgagcaggcccattgtatctgctcttatcacaggttacaagacaaatacattaaatatgtatagagagagtagaagaaaattatagccaattttatagctaatctattatatatattggcgtaagaagtgagctctactctaaagtctacagtgtagagaattcagtacttcctccgtcccattatgtctagttatgcaatttcgtgttcaatgtttgaccgttcgtcttatttgaaaaatttatgaaaaaaataaaaattcacatataaagtactattaacgttttatgataaaaaagtaatcgtaaaaagttcataagtacagtacttgaaatgtaataggacgaaggaagtaagagatacccctatatagtacaatttttcatgtgataattaaatggctgcaggagtgcaggtagtcagggagaatcaatttttcacgtgataaacggatgatcaatgttggacacaggaacctttctattttactagcatatttttctgtatgtcaattattgattttttttccacgtctcagattcgtttttattgtcaacagttagagattactaacctgtcctaaatggtatttcctcattctgataatcgtatatatttctataccaaggccaagaataatttaaatcacatcaatcaacacgccatgtatacagtctctcacaatgtatgtatcgattaaaagactatgctaattacactttagcatgcacacattcgaccataccgcattaattatattctgacgaaatccgtatccatacggttacatgatgatcaatttgagaaattttaaattccattatatgatgatcaatttgagaaggagggagtaagattctttttaggtgtacacatgtattaagtatgatagcacaaagtaaacgtgatgtgtaagatagctagacaatataaacttagataagttgatatggtttgtaagttttgtcgactggcgatacctgtagaccggatatagagggtattggggtacgctggtacgaggatctacgtagtacgacatcaagcaggcagaaaaacaaagattatactggttcaggccccttggtaggtaatagccctaatccagttgatatgggattatatgatggaaaccacatattacaaagggaatagcggaacttgacgataccgatgagatcgtagtcgagttgattcgactagatctcccggcgacttggctcctggaggctccggcttcgtaggctgtggtggatgtgttggtggtaagattcgatgccttaggtactctcgggggggccccttttataccgcaggttaactggtctccaagtaggactcggagacatcggactcggtacgatacaatgacgacccagttctatccgagtaggactctttccatctgtggactccataatggacttccttaacttatgtcggaaacgtccgtatacgcgcaagcataccatatcgatatgtagcgtatatcgaagggtagagggtataccttacccgtaaccctgacagtagcccccgacttatgcttaaatgaactcgtgagaccgatcgcgacttctgatgtcgaagttgtcgtcgttctcgatgtgagggccgagagacaaggagtgatcgacaacgtcgagtgaagctcaacggtcgtgagtgaatttaaattgaagtccgaaaaactgccgcgcgtaacggacccagaaatttccggcggccatctctctcctttccttggaattcgcaccatcgggagtgcgtctatttacgggggttttggggatccaatttgaagcccgcctgttgaaaaagctctccagcttccaagcgtccctcgtcttcttcgctcccgcaaaaaccctagctagctcatctcggtccattcttcggcgatccccggcggcaatggatctcgacaagtctacctccaccagcgcgtcgctgaagaaactgcaggaagaaggcgccctccccggtcgcgagaccgcggagagagaagtaggaggtactgaaccccagcctgtcctgggtcacatggttgtgatcgaggactttattctctgcggttttcttcctccgccttctgaatttctcctcttggtcttgaatttctatggtctttccttgctccatttgaaccccaattccatcgccttcctgagtgtcttttcgcatctttgtgaagcctacattggggtagagctgtttctcgacctcttccgcttttactatgagttacattggatggaacccacaaaggtgtccgggtgtgttggcttccgacttcgggatggcctgaagtcacgatacattcccttccagtgcccctcctcggggtattttccttttttagttaaattgactcccttttgtgcgtgttcttcccgacttatctgactctggtctcaatctacaggcttggacagcgcacctgtggagcgccgcgtcggccaactgatgatcagtggcccgacaacgtcgagcgatgtccccgttcccctttgcgagaaaggggcagccgagcgcgacgctgccatcaatgtaagtgtactgagtggtccttttgcatttttcttccgggatcgcattatgacttcatgaagtgtaggctctccctctgactgacatcatcgggccgctcgtggaccatcaggtggcggcgtcgctgaaggagaaggtcgccaaggaggcgcctgacgctgctgctgccgctgccacaacgagtggtggcaacgttccgaaaaaggggaggaaattctcctctgtggtcggacatcgtcggaagacacccaccccctcggtaagttctcctgttcttttatcacgtagtcggaagattttcacctcacattatatctgtcatacttcaggcctcggacgcgtctcccccgcctccgcgacggcagcagctagtgacgctcggcgagaagtaagtgaatgaattcgaggttccgtgatttcgtcgaactcttgcagtctgtctcaattgcagcctttcgcagggcggcgcgggcgatggcggcgcaagacgggtctggagggacctccagcgcgtctcctgctgtggcctcgacggatgtcgtggcagtgcccaggagccgcgaggcgacacctagcggcccaaccagcgatcttgtggctggccgttgttcgccggctgccgtcctcacctgggaggagctccaggtggagatggggcgcctcctcgaggctagtgcttgcggcattagccacgagattgcggaggcgagggcggcggtggcgtcgtcggcgaatgagcgcgacgaccggctggcgggcaacttggcggaggttcgcgaggacctccagaagatgagggaactagtggtcggcaatgagtgacaacggcagggacttgagcactgcatgttggagctcgagaacaacttgtcggagatccgtggctcgttgtgggccacctatactgggctgcaccagctcgccggggagtgcggcatcaagtctaccatcccggcgtatcccgatgagttctccctgacgacttctcttgcggagctggcggcggcgatggaggagatcccctctaagcacgcggccaggatcggagaggagacgtccaacaggatctataccggggcgtgccatgtccatgcatgtgtgaggctggcgcaccctgaactcgatctgcggaagatcttggatcagggggcggccagcgatgcgcgcaaggatgtgatggaggaggtcggcgacctgggggagtccgtcctcccactttttgaagagtaggatcttagctctcttgtactctttagtcatgctttgtaaaactcttattggttccaactgcctttgtgtgtgcggtcatcaccttagctttctttagcattttgatcttgagtactttgttgtcgtttgtagagatgttgatgtcgaggatgtccagcagcgcgagaagcctgagttgccagtgatcgttccagcacttgcgttcgagccacttgtgccggggggcgatgtagatcaaagttcgcctgtggggacgagcctagcaacgactcccttaggtcggttgtctttgttctcatcttctttatgcttctgtctggaccgactagatttgctgtgttctcgggagagaagagtagcttgacttaattgtttccatgctgcgcagacctcgagagtgcgcttgcagaccaggattgtcgcatccagtattggaggacgaagtttgaggtcgcggaactcgagagggctatgctggaagtgaagaaggaccaagccgtagagacactccggggtcgtgaggtgtggttcaacttgtataggaagagttgttgcacgttcatgtcaagagtttgtagggagctctgagtaccccgtggggatcccgaggaatcggtggccagatacatctcgtggctgaatggggcttgagcccagcttgaaggcatcggtcaacgcatcgacgaggccttgaagcaggagtgtcgtcgatcaagctgatatgccggggggcatgtgttggcttgcatacgagatcatcgtccgcaactgcacctcgagttcctccgcgaagggttttctcgttctcggagaactcctacggagatagacggcctggcgaagtcgatggcgccgctggcggagaaggtcttccagtcgatggactagcgttggccttcctagtagtctctgtatcctgtgacaaatgtcttaggaaaaaaggtgtaatataacttttgattttgacggaattgtaagtacttgtgaaatagtgaagaaatctatataactaagctttcttactctagatgtagcgtgtatgagtgtcttctcacttcgcgacttcgatcagtcgtttgagttatacactctcgctagcccccagccttgtcattggagaattgttctcggaagataaggctcttggacctttgacctgcctcggttgaacaagcactgatcctagcccccagccgtgaagttggaaagtttatttccaattacacggcttggttaatacgcacggtgagaactcttacacgaccaggtcttacatggtctttcgtctctacaggatccgacaaggccttatcggctctgggcgtccctagccgaagttcccttaggtacctcggaggccttgtcaagacggcgtaaagggacatgatgataggtttcaacgctaggtgtcatctgggtaagggatcatcgggaaggaacactttgattgtggtctggacctgaaaataggccttgttgaagctgtaagatgtctcacaagtatggatactattgacttatacatagaaattacgtaattgatcaatgttcaaagaatttgtcaactcgcgaccatcgccatctgcaattttgaatgcgcctggccgcacaacttgtgtgatcgtgtacggtccttcccatttgggtgagagtttgttccgccctgcttggctttgaacccgtcggaggacgtagtcgccgatcgaaagcgtgcgtgctcggatgcgcttctcgtggtaacggcgaagggactgttggtagctggctgctcgaacggcaactcgttcgcgatgttcctcgagtagattcacatcgtcatttcgccgctcctcctgatcctcatcggaatacttctgtactcgtgtactttgatgtcgtagctcggtggggagcatggcctctaagccgtacacgaggaagaagggtgtctccttgttggatgttgtcggtgtggtacgcacggcccatagtactgatggaagttcttcgacccatttcttgtcatgcgacatgagcctgtcgtagacgcgggtcttgattccttgtagtactatgccgtttgccctctcgacttgtccattgctctgagggtgagaaaccgaggcgaagcagatcttgactcctagcctgatgcagtaatcctggaaatcggcactgatgaactgggagccgttgtccgttatgatacggtggggcaatccgaatctgcaaaatatccctttgatgaatttgatggcgttgtcggccttgatttccccgtgggtgtcgcttcaatccacttagtgaacttgtcgatcgccacgaataggaacctgtagccaccctgtcctcgtgggaatggcccgagtatatctagcccccagcacgagaacgaccaagtgagagggatagtctagagtgcttgcgctggtaaccttgtgtgtttactgtggaattaacaggcttcacaccgctgaaccatgtcacaggcgtctatgagggcggttggccagaagaacccttgtagaaaagcttttccgactaatgtccgaccggcggcatgtgacccacagatcccttcatgtatgtcgaggaggaggtgtctgccgtcgtcggacgagacgcattttaggagaaccccgtttggtgccttcttgtgtagatcgttgccgatcatacagtagactcttgcttttcgggatattttctcagcttctgcgtcgtcctcgggcaactcttcgctgcctatgaatttaatgagtggggtgcgccagtcgtctgtggtctcgatatcgggaacggcgcgctctgcctcaatagccctcgagctgatgctgggggcgaccaggctatcttcgtcgcttgcctctttcactgatggcctggtcagcatgtccagaaaggtgccaggttcaagtggctcttgtctggacgcacgccctgctagatcatccggttcgatgttgtctttgcggtatacatgccggacctcgatcccatcgaaccttttttccagcttcctgacttctgcgagatacttggataactcggggctagagcacttgtaatctttatgcacctggtttgcgactagttcggaatcgcctttcacgatcagtctcctgactccgagtgcagctgcaacttttatcccggcgagtagtccttcgtactcggctatgttattagtcgccctgaagttgaggtgaattgtatgcttgaattgatctcccaaaggtgatgtcaagatgaatcctgcccctactccttggttgttgagtgtgccgttgaacgccattgtccacgttttgttgtcgatttggttgtctgacctgttatcaggcatagtccaatcggtgatgaagtcggcaagtacctgggacttgatggctgttcgtggtgcaaagcggacatcaaactagcttagctcgactacccattttgcaatgcggccgacaacgtctttgtttctcactactttaccaagagggaaggaggatacaactatgaccctgtgggctataaagtagtggcgtagctttcttgatgtcatgattaccgcgtagagcagtttttggatctgtggatatctcgtctttgcatcgtggagagcttcgctgacatagtagactggtcgttgcaccttctctctcgacaacaatgacagtgctaacggaatatggcgtggcagcaatatagagaaataattcttcattaggttggggggcaacaagtacaggtggatttgataggtagcgcttgagtgcaatgaatgcctcttcgacttcctgtgtccatacaaatttgtcttgctttttcagcagagcaaaaaaaggttgtcctcgctctcctatcctagcgacgaacctgcttagtgccgccatgcatccggttagcttctgtacttccttgagtcttgtaggcgacttcatgttctcgattgccttgatcttcttgggatttgcttctattcctctgctagagacgaggaagccgagaagcttgcccgatggtactccgaacgtgcacttctctggattgagcatgaggcgatatcgccggaggttgtcgaacgtttcctacagatcatcaatcaatgagtagcttgtcttggtcttgacaacaatgtcatcgacataggcctcgacattgtttccgagttggtttctaagtgcaccttggaccgtgcgctggaaagtgtttcctgcggttattagtccgaacggcatcttaacgtagcagaataccccgaacggcgtgatgaatgctgtcttctcctcgtcctctttcgccatgctgatttggtggtagccggagtaagcgtcgagaaagctcaacaactcacaaccggctgttgagtccaccagttggtctattcgaggaagagggaagtgatccttgggacacgccttgttgaggtcggtgaaatcaatgcacattctctatttcccgttggccttccgcaccatgactgggtttgctagccactctggatggagtatctctctgatgaaactggctttgagaagcttgtcgagttcttctcgtatggcttgttttcgatctggtgcaaatctccatagtttttgctttactggcttggcatcgggtcgcaccatgggtttgtgctcaatcacctccctgggtacccccggcatgtcggacggctgccaagcgaacacgtcagcattgtcacggaggaaggtgatgagcgcgagttcctatttctcgcccagtgatgccccgaccttgacggtcttgttggggtttgcactggagagtggaacgatcttgattgcaccgtccggtttcggcatcttgtttgttttgctcactttcttgggtggctcagctgtggcaggtgggttgggcgtgtgctcgaccatgtcgacgctccgcttgtcgcattgcactgccagcttagcatttccttgaatagtgattgttcccttcggtcccggcatcttgagtacttgatacgcgtagtgagatgcggccatgaacttcgcgagtgcagttctcccgatgatggcattgtatgatgtatcgaattcagcgacatcaaaggtgatctattccattcggaagttgtttgcttggccgaaagtcacaggcaacgtaattttgtccaatggtttggacgatgactgaggagtgattccatggaagggttgatcggtgggtgtcaactcgcttcgtgggatccacatcgcgtccaaggtgctggcgaagagaaggttcattgagctgccgccatcaattagaactcgtgcgaccttgatgttacgaatagtgggttcgatcacgatcggatatcgccctgggatgacagcagtctttgggtggtcctcttctgagaattctatcttctactcggaccacttcatcttgggcgcagcccctgccacatcgaacaaacttcacgttccaccttcttgtattctcgctttgaggagtatgccgtggaacccccgaagatgtgcgagacatggagatcggagtctggatatgttgagtctgattcctgagtagctggctcagcgtccttctcgaccacacgtactcgcttgcctttttccaatgccatatgttttgcgagcgactttttgaagacgaggcaatcttctaaagagtgtatgtctgacttgtgtatagggcaccatgttttcttcgcgtcgctaccttgtgggtctgggcgcttgggagggtccgcgtattctgttgcgaggacttccgattgagctttcctttttccacttttgcgatttttcttcttacttgactcaggtgcacccttggctggtttcttctctcctccggttttcggtttgtcgttcttgcgtctcagtgcgtcgtccgcatgggcgcatcgatcgacaatttcaaataatctccgagtagtcgtgacgtgtctcgttgccaactcctgagtagtgtagcgatctctgacaccggatttgaaggcgcgaattacagaagtatcggtgatttcggggattgtttttctgcactcgttaaagtgccgaacataatccctcaaggattcacccgggttctatgtcaatgcatgtaggtcgtcttcgatgcgtggcgcttgtaagttccttggaagttggcgacgaaatgctgccataggtctgcccacgaagaaatggagtaggggggagatgcatcagccatgaacgtgcagagcctttcaatgccgttggcaagtaattcgccaatgcgttgttgtccgctctggcagcgtagagtaccgtggagtaaacctgaaggaattcttctgggtcggtgctcccatcgtatttctctattgctccaggtcggaatctttcaggccatcggacatctcgaagtgaatggccgaaagctgtaacacagcgctgggggcggtgggttgtcggcgatcgtacgtcctttgcggatgtctatctgatgatgaggatgaggaagatgacgatgatgacgatgggtcgcttggtttcgcgtacgattacgaggacgtcggccgagtttttgagaatcttgtcgtcgtctcccattgttgtctcggcgccgatctccatcgtcgtcgtcattatggcgacgtcctcgactagtatcgcccagcacccgccgttcgcgatcgtcgtgatcgcggcggttgtggcggttatcatggtctcggtcttcgctcgaacggcctcctcgttcttcattatcatgacgccgtgaagagatgcgatgtcgggaacggttctcattgtcttgtgtgtgtcgcgcctctcggcgaccattcaggtgatcacggagatcgccggtgccgcgaggtggaggggtggctcagtgaggcgattcccgctgttcagggttttcaccattagcatcgccagttggtggctgttccgggtgcgctacagcagcggcctcttcgaacgcgttgctgaggttggtcactgattcccgtaaacgctctgtccatcgtgcgagatcgtcgttcagaacgggatcatagagggtttccctcaatattgcgttgacggctccaatgtgctgggccggtgtagtcacttgattttccgcttccgcatttgcgtgtgctgacgtgccgacatcgtcgatagccaatacctcgcgcggcgtactcgttgtcaatgaaccatagtctttgagcaggtgcaagactgatggttcgtggggatcgatgtcgactaccctaacaaatcgatctgaaatcggcgtcgctccttgttccttgtcctcatccctaagggcgacgcgtgactgctggaccttaggaggtggcgtcttcatggcgctgagaaagaccttgcagctcgagaggtcatgattctttgacttgtgaataggacaatagacatcacgagttggagaagtacgctgaattccgcgctttttgccggcacgaatttcagcgtggacgttgagaaaaacccaataggcttgcaaggcatgttttctggttttgtggataggacaccaggaccttgtcacctcagaagtcatcctcgtcggctcgtgattcttgtcagaaggacaaggcttggccgcactaggttccttctcgagctcggatatcgtcgacgttccgatctccgcttcggcgggaggatccttcgacatagagtcgtcctgggttgtagccactgcgttctcatttccggccatcggcgggccagctgagatcggcactgtggtgtaaaccgggaagacgatttcgccgacttgagtccacaccagcgttgttgaagtaggaactacttggttgaagttggtgttgatgctgttgtcgacgaagcaggatgtcataatagtagaaccttgagcaccaagtccccctacctggcgcgccactatcgacgggagatacacgtagaccggatatagagggtattggggtacgctggtacgaggatctacgtagtacgacatcaagcaggcagaaaaacaaagattatattggttcaagccccttggtaggtaatagccctaatccagttgatatgggattatatgatggaaaccacagattcgactagatatcccggcgacttggctcctggaggctccggcttcgtaagctgtagtggatgtgttggtggtaagattcgatgccttaggtcctctcgggggtcccttttataccgcaggtcaactggtttccaagtaggactcggagacatcggattcggtacgatacaatgacgacccagttctatctaagtaggactctttccatctgtggactccataatggacttccttaacttatgccgaaaacgtccgtatacgcgcaagcataccatatcgatatgtagcgtatatcgaagggtagagggtataccttactcgtaaccctaacaagtatggtttatgataatttaaatttaaatagtatatagaatgatgattcaaatataaaagtaaattgatgtgaaaaggagggagatagtttggatcatagattaatcatgtaaggtctagtaagagaagaaaaggagtgagatgatttggaccatagataatcatttaaggacaaaacaattgatgtgatatgacttaatgagagaagagagagagagagcgcattaactaagttacgagttaggatgaactatataggtatataagatattataaaaaaagatgatgagacataatcaaatattatgtgagatgatttaatatatttgcatttgataagctataaaatttaatatattataaaattatagataatataacatgcttgcatgatgtttaaggtcgtgttcggcagcttgagctcccaaccacaccactttcgttttccgcgcgcacgcttcccaaactgctaaacggtgcgttttttgtaaaaaaaatttatacataagttgctttaaaaaaatcatattaaatcattttttagaaaaaaagataatacttaattaatcacgtgttaatgaaccacctcgttttacgtgtttgaagggagagttccaaactctccgtaccaaacacagcctgagtgttgtaattatcagtggatgatgatgtgacatctttgtatgttaagctttaggatttagtgggctctaactttatagtaagaggatatgtgaaaatgattataaaaattttgattaattgaaaaaaagtaagtaggtgaagaaattaaatggagaatgcttgtaattagttgaaatgatggggcaagggagaaatacacataaatgtgttaggtgtcggttgggaagcccacatagatgtttggatttctcaacctacgcagcccaagaggcattgatatggaggaatcaactgtggcagtttacgaactgacacctttgaaactccacaaatgaaaagacagctcgatgtatcggctcaaaacgagccgatgcatcgagcccctccccattacccaaatcacacatcagaaatccacataccaccatcaatccatcctacaacatccccaaatcacataggacaaatcaccatggatccatccaacaacaacatccccgcacaaatcaaacatcataaatcacaaaaattcattctgaaatattggcaatccaattagattcctactctccaccatgaataacctgcagtcaccatcgtgttggccggatccagtgtctatcgtgctggggcagggagaggaagagacaatcatcgcaactgttgtcgtgacgtgcagagaacaagaaggggtcaccgccactgcactaggtagaggaagaggcggccgccaccgcgccacgcaggggagaggaaggaagaggctaccgcgcgtggatctggttgtcccgagctcgggactggccacctctgctctccatggacagagggcggccgcctctgccgctgcatcgccagtgtcgttgaaggtagtagacaatggctggagaagcacgctggagaaggagagggtgagatgctggagaaggagaggaagagggagagaagcacgagagagagtcgaggataagtacaagtcacttgagtagataaggatgggttcagctcggctcttagctcagatcgttttttcatgtgttgattttttatttagagctggcacagataatacaagtgtagatgccagttgcactaatattatatgtgctagttttatttaaaaccggtacatatagttgatcaaagatatcggttttatattttctctattttttgaaggtggaaaactagtacatattaggagttttgtagtagtgatagattcattttgagacggatgtactaattattaacaatagcacatgtcagtaatggttttattgattccggtaaaatcttaaacaaaattattctagtatggtttaaaaataaatcaatgtcagatagggttctatttagattgtgtgagagaaggcttgggggtggcgttgtagcaacataggaggcggggaaattgggtagagtagagaactagcggcattacgaggaaacaaagaaagagagggagttagggttgagggcttgcacgaacctcaaagcaaatctaatatcatcattgccatccctaagagcatgattgcatctatagatgggagggtaagggggtcacgcataggcttggcctaaggcgccaccaaaacctaggaaagccacaaggtcaacagtgcatgtaggaaaagcggaatgaagccacaccctcccaacgcgtttgcagccttctctccccgtgccaagaacggatgacaaaaagggtcacacgggcttcaatttggtgggcccgctcatgaacatggtaaagattcgtattgaacctctgacgtggagagatcgggctaaatgacagctcagcacattgtgaaggcactaacgagatcctctgaatccacttccatgttttatggcaccaacgaatctgacgccaaaccatacactctggacctgtttggtagagctccaactcctaaaaattttgctccaaaagttaggtctggagtgcagttgtggagctgtctaaacccacctccacctttctagttcattttgtgagagagcttcacccagctccgctcacattttaggtggagctgaaactgtttggctgaactccaacttcagaagaggtggagttagagctggagttgtgccaaacagaccctccatcccagcttaaactagcacccaaaaactgttggctcatagcctcaaaattgcaagcatttcgtagtacccgtcgtcagccgtgacatcactgttcatctcggcaaatgccaatgggaaattggcaattagtcccacatgattaggtagaataacctactctcatcctccattctaataatatgatagtttagtttctccaccaccgtcagtcgtttagagtcactaatatacgtataatttaaattatatatatatatatatatatatatatatatatatatatatatcaagcttacatgatctatttaaaactcaaaacgttttatttaagaaagaaagtaccccttagaaattaatggctacggactagtgaagtgagggagatatttagtggcatatttgtttcaattagatgaatagtaataaaatattttaaaaccgttaaatttgtaatgatatatgtatctaattaaccttagaaattaattactatatggacaagtgaagtgagagagatataagtattgtattgtattataggagtagaagcaaagctccatcgctctgcagctaagccacgagcaacacaaaccacacctgttctgcggcgagaccatggcgccgccaccggccgctcacgccgctggcctccgcgtcctccgcacgacgcgcgtcgcgccggcgccgcccgccggccagcccgcgctgcccaagcgagccctgcctctcatcttcatggacgtgatgtggctccgcgcccagcccgtcgagcgcgtcttcttctaccgcctcggccccgacgacgatgtcgacgccgtgctgtcccggatggaggagtcgctgccacgggcgatccacgccttctacccgctcgccggccgcgtccgccccacgcccggcgagaccaaccggtacgagctcctctaccagcccggcgacggcgtggcgttcaccgtcgccgagcacgacggcgtcggcgtcggcgtcgacgagctcgccacggacgagccgagggagctcgccaagatcgcgccgctcgtcccggagcttcccgagggcggcgcggagctcgcgctgcaggtgaccgtgctgccgcccaagcgccgcggcctcgctctcggcgtcatcgtccaccactccgcctgcgacggggtgggctcgacgcacttcctccacacctgggccgccgcctgcgccggcgaccggaagctcccggagccgcccgtcatcgaccgcacgctcatccgcgacgtaccggagatgcacgacgagttcgccgcacccacgaacgaagccaaagatctgttcaaggcgcccgacgccggcaagttcctcgccaccttcaccctgtccagagagcacctccagggcgtcaaggacgccgtcgccgccgaggccgcacgtcgcggcgttccgccgcctcggtgcacgtccctcgtggcgatgtacggcctcatgtggcactgctaccgccgctccagacgggaaagcgacaacggcggcagcggccgtgccgccgccgccgcccacttcatcttctccgtcgaccaccggtcgcggctggtgccccgcgtccccgacaagtacctcggcaactgcgtcggcccgggcttcgtctcggcgcccgaggaggagctcgccggcgccgccgtggcgggcggcgtcttcacggcctgcgcggcggtggccgccgccatcgacgaggcggtgcgcggcgagcccgcgtactgggaggggtggaaggagcgcatcgtggaggcgtgcagggacgacgcgccgttctcggtggccgggtcgacgaggttccgcgtgtacgacgtcgacttcgggttcgggaggccggcgaaggtggagatcgtgtccgtggcgaagaccggcgcggtgtcggcggcggaggatcgttctggcgccggcggcatcgaggtgggcatagctctgctgccggagcgcatggacacgttccggaggtgcctcgccgacgccatggcttggttttcctcgtcttcccaatgcaactagcgtgggaactgcaacacgtacgtcgagtagatttctttagagagattcggttttcatgtctttttgctggcttatactctctctgtgaaaaaagaaatcaaaacctgggatgaatccacacatgtatgttaatattcatcccttgggtttgattctttttagaactttataatttaattttggtgattgtatttttatgcctactacttttaaaattctagtaataattatttacctataaattactttttttgctttgttaatttttttatagcttattttgttgctcaaccgatcagacaattttgaatggcatttcatttgagagtggattttaaactctcgaggtgatgtctttttattgtttgcatgacacgtagaatagttataaaaatattgtaaaaattgagaagatgtattaacatatactatatcactttagaaacatgtaagttaaaatccaacttttataagttgcaatgagaaaaataaactacagctaattaatgtttattcgtagtcacacatgtcttttttacaaagtgtagaagttaaaatttaatttgcatgtttgtggagtgatctaacacatcgttattaatctatcttatcaatttttttcttatcatttgagtgacatgtaaacaacgaagggatgtcgcctcgagagtttagaatagtttcaccatttcatttgcccttggctgtcttcttaactcaagattctcaacctgcactctctcattcctcgcatgcacgtatccttaactattaaacaatatgtttttgggaaaataatctttagaaaaagatcatatcaattcattttttaaacatttttagctaatagttaattaattatgtgttacaatctaaataaatctgtctagatttattatactagaatgtatctcgtccagttttagcttgcttgtaatattttgagacgggagtggggcgtgttaagcttggtagtatgcaagaccaatatctctatttatgcttatgcttcttactcaatactactcgtaagtctccgattgtttgtaagctattgtatttgtatttactcgtaagcagggtttcccaaaccgctgaggctggggttaccgcgccccggccgtaagcacggttaccgcacggtaaaccacggtaactgtgaaaaactgtacaaaattcatcaaaaatttaaattattttttaaatttatttgaatttaaggaggttaccgtggtatttacattaccgtaccccacggtaaccgcgcggttaccgacggtacagtgaaccctgctcgtaagtttttaattacttgtttcgctcctacaggctaggttctaagtcttgtagtgtactacatccattttaaaatacagtaaattttagttatgaatttgatttttaatgtttatattttaggatggaaggaataatgtttaagactagcaaatgataaatcggcaaatgtataatgtcagaactctagctaaaagtcgtaaaggtaatatgaataagccaaagctcgtaatgagttaacttgcgaaccggaaccaacctaggctttcagcgcaccaatatatatatagccgagctaagcagctttttacgataccgagcttaggtagtatagtcccagtttaagcgcacacatgagttttcatgtctaatttttgttgttcgttttatttaaaaaaatttaaaacacataaataagacacaaagtactatttatgttttattataaaataacaataaaaaatactaaccataaaataattttaaataatacgtataattagagttggaaaaaaaactcatgactgcgtttaaaatgggatgaagagagtacaagccttaatagttactcctccctctgttacataataacttcttgtatccaacataaacttaattttagtaatcattattttgtattgatatatgtgagataagataaatatattagtaatagataaaaagagaaataattgtattaggatttaataaaatatggctgtgttattttttattttgtattgatatgtgtgagataagtgaaaaatgcttcataataagtttggttttagatcatttcatttatcttacagtaagtttatttttgagtaattattgcatcggagtttataaaagtagagaataattatattaggagtagataaattaaaaagtagttacattgcgatttgataaagtatgatattctattttttattttatatttgtatgcatgaaataggtgaaaaataaatttattttggacggagacattagttgattgccatcgtcggcattttcgaactcgggacattaatccatacacctacacatagcagttatgatttaatatagatgcgggcaaatttaatactcctaatataaaatgaaaaatagcgaggagtagttgctaacttgtgatggaccagtgctacaaattattgcgatggaacaataatatggctgtgtactgcctctctttggtccataagctgcagactgcacaatgtgatgatgttaaaccatactctctctgtcttataatacaggagatttttgatggatgtgacgcatcttagtacaataaatttagttaaaaccgtctgtctaaatttattgtattagcatgtgttacgtccaccaaaaatctcctatattataggatggaggtatgggatggagggattacttcgctagtttgcccacctgatttgaccggcgaaccaacagattaagtatgacattaattaagtgtgcagctgttaaatgtggtggagggtggagcccgggcgcccgtgctagccgggcgctatctccgctaccgacattttgcataggaaagcgatcgaacaaagtacacagagagtttttgcttgttggatcagacaagtactggtacatatactactccatcagtcccacttaaattttgagcttttgattacaacgtttaaccactcttcttatttaatttttttttcaaatataaaaaaaagttatgcttaaagtactgtagataataaagtaagtcacaaataaaataaataataatttcaaaaaaatttgaataagacgagtggtcaaacgttacaaacaaaaactcaaaatcccttattattatgggacggagggagtacttactccgtcccaaaataagtgcagccatggttttccgcgtccaactttgaccgttcgtcttatttgaaaattttttaaaaaaaattaaaaacataagtcacgaggtaaagtactattcatattttatcatttcatgacaacaaaaatgctaattataaaaaaatttcaaataaaacggatgatcaaagttagctcgatcaaagttgacgcggaatatcatggctacacttactatggaacagaggtagtactaattttttttactgtgtttctttttgtttcaccttctcatttcgccggtaaggagcgaccccaccgggacagtctcaagcttatatcgtggccggtgatcacgtgacgcgtgcgcgcgaaagcgctgtagagcgaggcagcgagcgtcagattcagggaggcaggacagtgggagcagtgactggtatctgtgaatagttaatgacagatttatctcaagaatgagccacgtcattaaaaaaaattaaccgttggatggaggtaaggaagaagctcacgccgtccgatcatgcggttaaaataagacaatggaacactctggaaacagtcaacgggagttcaaaggatataaaatgctactaagaaataaaggaatgagaaataagataaagcggccataagggtggcgatcttcgggactattcaaattgtagctaaataaaccttatcaaattttgattatgtcaaaatttttataagttagcaatattactaaaattttggcagggtttcttatgtatcaccaagtttaacaacgaattaatatatgcacttttttttaacaattttacataaaaaatggtatagttgaaaattacataacagccccctcttgactcctcatcatgcgacatcacacatcgtcgcctcggcctctgcagtatcctcctcccccaaatacctcctcttccactgtttcctttgctaaccactccggtactcccgatagatagacggagggggataagggtggcggaaacaattgttggaattaatatatgggctaaggcccattcgaagattaattctttggaaaatcacaaaagcccacctcatgggatagcatgcatgtggagtttagtaccaccttgcgtattctaggagaggggaacctcattaaaagggaggatgccctcctagccacttgaagcatgagtggtggagagaagaggggaaacacacacgcttgcctggcctggtagggaagggtagggcaggcggcgcgcgtgcacgacgtacgcgtcgaatggtccgcaaaattggctcctcacccttgcgcagatgcagcctccttttgcagttttgttttgttttgttttggaaacattccgaaaaatccggtgtgtgaaaacggcgtggagtccggataagttacgcgcgaattatccggttcggttacgcggagtggagatcgtgcgggcgccctgatcaagcgacctatctctatataaaccgagccgccgccttcacgcaacacacgcaaaatcaatctaaggtttgcctcctactctgtactgcgccgtccctcgtagactactccatcccgctcgccggcgtgcaccggcaatcgggagagcaggtctccggaacctctgccttcgacgtcctgcaccgggagaaggcggcaataaggttttttggaagcgcttcacgcgactactccctgttcgtccgcgaaggctcgccttcctctccgctcgcgtgcttcgcgccttcgtcgacgctcgcaaccgcgagtagttcctgccgtgcaacccgtctttccgccacctcggtacgtgttcgacatgttgcgcatatttgatctgttcatgttttactacttagtttacatgtttagatctaatgatgcgttcaatctagtttacatctacaatgtcatgatttatttatggaataaattaaatcattatgtgcttataatttcaacaatccaaaaaccttattataggcgctttgattttactatggctggttttgccgatgcactgaggccagataaattcaccgttgtgcacttcaagagatggcagatcagggtcactctgtggctgacagctatgaaatgcttctgggtaagtactggcaagcctatgggcgttcttaatgctgatcagcagaaagaattcgatgagcccactactctctttgtgggatgcattcttagcgtgcttggcgatcgtctggtcgaggtgtatatgcatatgaccaacgctaaggagttgtgggatgcactgaatactaaattcggtgctactgatgctagcaatgatctgtatatcatagagcagtttcatgactacaagatggctgacaaccgttctgtagtcgaacaggctcgtgagatacaaaccatggctaaggaactcgaactcctgaagtgtgtcttagccgacaaatttgtggccgggtgcattattgcgaaactacctccatcttggagaggtttcggtactgcactcaaacacaagagacaggaatactccgttgaggggttgatagcgtctcttgatgttgaggagaaagctcgagaaaaagatgccacgtctaagggccatggtgggcagtccagtgccaatgttgtgcacaaggctcagaacaagagcaaggggaaatacaaagctcaacagaccaccaacttcaagaagcagaagaagaacaacaataatcctaaccaggatgagaggacttgctttgtgtgtgggcaacctggtcatctggctaggaagtgtccacagcgcaaggggatgaaggcacctgcagggtagacttctaagtctgctaatgtgaccattggcaacactggagatggaagcgggtatggtaatttacctactgttttttcagttaatcagtctactaattggtgggttgatactggggccaatgtacatgtttgtgctgacatctcattgttttctccttatcaggtcgcaccgggttccaccgtcctaatggggaatgggtcacatgcttctgttcatggtgttggcacggtagatctgaagtttacttcgggaaggatcatgcagctgaagaacgtgcagcatgtcccttctatcgacaggaatcttgttagtggcttccgtctgactagagacggatttaagttggtttttgagtctaataaagtagtcatgtctaaacatggatattttattggtaaaggttatgagtgcggaggcctgttccgcttttccctttctgatttctgcaataagtctgtgaaccatatttgtggcagtgtggatgatgaggctaatgtttggcactcacgtttatgtcatattaattttggcttgatgtctcagctttccagcatgtgtttaattcctaagttttccattgtcaaaggttctaagtgccatagttgtgtgcaatcgaagcaaccttgcaagcttcacaaggctgccgaggagagaaacttggcaccactagaactcctacattcagatctttgtgaaatgaatggggtgttgacgaagggtggaaaacgatatttcatgacattgattgatgatgctactagattttgctatgtgtacttgttgaaaacgaaagacgaggctctagactattttaaaatttataatttataaggcagaagttgaaaatcaacttgacagaaagataaaaaggcttaggtctgatcgtggtggagagtttttctcaaacgtgtttgacttattctgtgaggaacatggcatcatacatgagaggacgcctccctattctcccgagtctaatgggattgctgaaaggaagaaccgcacactgactgacttggtgaatgccatgttggacaccgcgggactacctaaggcatggtggggggaggcattgttgacctcgaatcatgtgttaaacagagttcctaacagaaataaggacaaaacaccatatgagatatggattgggagaaaaccatcactttcttatttgcgtagatgggggtgcttggcgaaagtcaatgtacgaataacgaagaagcgcaaacttagacctaagactatggactgtgtctttctgggatatgctcatcacagcattgcctatagatttttaatagttaaatctggggcacctgacatgcatgttggtacaattatggagtctcgtgatgctaccttctttgagagctttttcccaatgaacgatacacatagtggttcgagccaaccctctgaaataattcccagtacaatcacaccaccagaacaaactgaacatacacatgaacatgtctctgaggaggatgtcagtgaagctcctcgaaggagtaagagacaaaggacggctaagtcctttggtgatgatttcactgtgtacctcatggatgacactcctaagtcaatttcagaagcatatgcatctcctgatggagactactggaaggaggctgtccgtagtgaaatggattccattattgctaacgggacttgggaggtggcagagcgaccctatgggtgtaaacctgtagggtgcaagtgggtgttcaagaagaagcttaggcctgacggtactattgaaaactacaaggctcggcttgttgctaagggctatactcagaaaggaggcgaagatttctttgacacttactcacctgttgctagattgaccacaattcgtgtgctactttccctagcaacctcacatggtcttcttgttcatcaaatggacgttaagacagcttttcttaatggagagctggatgaggagatctatatggatcaacctgatgggtttgtagttgaaggtcaagaaggcaaagtgtgcaaattgttgaagtctttgtatggtttgaaacaagctcctaagcaatggcatgagaaatttgacaaaacattgacatctgcaggctttgcagtcaatgaggcagataaatgtgtgtactattgccatggtgggggtgagggagttattctatgcttgtatgttgacgacatactgatatttgggacaaaccttgaggtgataaatgaggttaaaccattcttgtctcaaaattttgatatgaaggatttgggagtagctgatgttatcttaaacattaagctaattagaggtgagaatgggattacactcttgcagtcccattatgtggagaagatcttgaatcgctttggctatattgatagtaagccttctccaacaccttatgatcctagcttgttgcttcgtaagaacaaaaaaattgctaggaatcaactggaatactcccaaatcattggctcgctgatgtacctggctagtgcaactaggcatgttatctcctttgttgtgagcaagttgagccggtttacctctaatccaggagatgatcactggcgtgcgcttgagcgagtaatgcgctatctgaaaggtactatggaattggggcttcactatactgggtatcctgcggtactggagggttataatgattctgactggatctctgatgtggatgagatcaaagccactagtggatatgtcttcacactgggtggtggtgctgtttcgtggaggtcttgcaaacagaccattttgacgatgtcaaccatggaagcagaactgacggcactggatactgctactgttgaggcagaatggctgcatgatctattaatggatctgcctattgttgaaaaaccggtgccggctatccttatgaactgtgacaatcaaacggtaattgtaaaagtgaatagttttaaggataatatgaaatcgtctagacatgtgaaaagatgattgaagtctgtcaggaaattaagaaactctggagttataacgttggattacatccaaacagctagaaacctgcagatcccttcacgaagggactatcacgaaatgtgatagataatgcatcgaaggagatgggtttgagacacatgtgagttatactatggtggtatcccagtctatgtgatcggagatcctatgaattagaacctgggaagaacaaaccattagtaaactagaggagagtaccgatctataccctctctaaatgaagatgcatgtactctcgtgagctgcaaggcaggttggctatgccttaatgagttctgttggctttaattagcgaagatgctgtcctgtagagcattcttgaaagaactcacatttgtaagcttgactgttggtcgcagtctatggagattttgggtgaatcttctagaaagcttactaaagacctaggagtatgacttatacgctccacccgaggggtagtctacagacggtctagtaccagataagactctgagtgaaactttcttgcacaagacttgcaattcaagacgtattccattgttcaagttgtgagtaagtgtagcttggagttctaggtggatgttcaaccttaatcggtctccatcgaaccgctggtatattaactgtacattggaaaaaggcaaatcttagtgggattttgagatttggtgggggattgttggaattaatatatgggctaaggcccattcgaagattaattctttgaaaaatcacaaaagcccacctcatgggatggcatgcatgtggagtttagtaccaccttgcttattctaggagagggggacctccttaaaagggaggatgccctcctagccacttgaagcatgtgtggtggagagaagaggggaaacacacgcgctcgctcgcctcgcctcgcctcgcctcgcctcgcctggcctggcaggacaggcgacgcgcgtgcacgacgtacgcgtcaaatggtccacaaaattgtctcctcacccttgcgcaaatgcaacctccttttgcagttttgttttgctgcgggaaattcggatttgttttgttttggaaacattccgaaaaatccggtgcgtgaaaatggagtggagtccggataagcttttgcagttttgttttgctgcgggaaattcagatttgttttgttttggaaacattccaaaaaatccggtgcgtgaaaacggcgtggagtccggataagttacgcgcgacttatccggttcggttacgcggagtggagatcgtgcgggcgccctgatcaagcgacctatctctatataaaccgagccgccgccttcacgcaacacacgcaaaatcaatctagggtttgcctcctactctatactgcgccgtcgctcatagactactccatcccgctcgccggcgtgcaccggcgatcgggagagcaggttttcggaacctctgccttcgacgtcctgcaccgggagaaggcggcaatgaggttttttggaagcgcttcgcgcgactgctccctgttcgtccgcgacggctcgccttcctctccgctcgtgtgcttcgcgccttcgtcgacgctcgcaaccgcgagtagttcctgccgtgcaacctgtctttccgccacctcggtacgtgttcaacatgttgcgcatatttgatctgttcatgttttactgcttagtttacatgtgtagatctaatgatgcgttcaatctagtttacatctgcaatgtcatgatttatttatggaataaattaaatcattatgtgcttataatttcaacaacaaaaggcgacactgacggcagcaaagacaacggtaaagcggggttcgcgcagcagcggcagggcatgaaaccctgaccggcatggagaacacatgtagagacatgagaacacattcaaaagtcgatcagtttatcggctcctgtttgcttgccggagatggacactgtcggagctgacaacactgaatgggggcaaacacctgcatacttagcctttggacggcaccgctacatgatcctcacatgctccacgctcaaagaaggcgaccgcgctcaccccaagcacaaaataaagaagctggcctccttttcctcaccagaacacatatctcacccccgacaaccgacgagctcgatcggaaatagcttccctccaaccagtgagttcaaggagagctcgctagcagcagtagaactgcagaagaaaagagaagagtgagtagtagttaagaaaaaaatgacgtagggagagagatatgagggaaaaaaaagaaagaacagagctcgctctttgctctacggccgaaggcactcaccaaggcaggaagaaagaagaaacaaggagtattttactggttagggcatccacaatctgagacactcctagagtaccctcactaactgaggtactctaggcgtactcacctttacaatgcaggccacgtctaggactctgggtagccccaacccaaaaaagcctctttctctcctattcctctctttcctattctacccctctcttccccttctctctctctctttctccatcgcacgcacgtgagagtgccgtcgccactctctctcccgccgctctctccctctctctctcccgtgatggtggtggcggcgaccccggaggcggcagatccggcgctgccgtggccggatctggccccccggtggatggagcgccgccggccgcgccgcattgaggcggtggacggcgagcgcgaggcgagctcgaggcgacggacggcgagcgtgaggcggcggactgcgagtgcgaggtggcggacggcggtggcgagcacggcaccggtggaggaggccgggcaaggcgcgcggtggccggatctcgtcgccgccatccccgagcgtgacgaccaccaccacgacgtcgtcctcgtgctgctcggccgcgagcacgggcacctcaagcccgtcgacggcgccgagcttgacctccgccatcctccgcctcctccgttgctccttagcccgtcgacgacgccgagctcgacctccgccgcctactcccgctcctcgccgccgctcttgccgtcgcctcctcccgctcctcgccactgctcgggcggttgctgtggcggcggagggcccaagagaggggaacgggcgagagagagaaagagagagaggagaggggtggaaggggaatctatcgctggagacacggtggccataggaaccggtcgctgcaatgcgttgctcgtcttcgtccctggctaaaaagctgcgagaggcgcgacccctagctagggtgtgcgcggactagcgagggaacgacgcagacggaaaaattgatggagggtgctagggacacgacctaggggtacccattgtagatggccttagaccgtcagagtggctcacgatggcactggtggagaaaccgtttgtagtcccggttgtcaaaccgggactacgaatccgggactaaagatagctatctttagtcccgggtgaaataactgggactaaagatcgatctttagtcccggttcgtgttaccaactgggactaaagatcggtcagccacgtggtcggccgaaccatctttagtcccggttgtgttaccaaccgggactaaagatcggtgcaccactttttttatttgcatggccctgtttgctgcatggttgattatatatatatatatatgtatatatatgcatatgtgtatatgtataaatcatatattacacacatatgtataatttaaagcacttaacattttatgtgcatatatgttaccaaaatatatattaacactaaagtaaatgtgtacatatataaatatatatatacatgcatatatagtacaattcatttgctcagtagctatagctaccacttcgacgccggcgttatgtcagaagaggaaggaccgacgttatgaattgtcgatccgtcgtagtagaattcaccatcggaattaaggacttcttcgttgatgaatcccatcagttgttcttgaacagccatgataaaaaccttgtgtgggagattatccctcatgtgaatatgctatcattcgaaaaaataatgacgtatcaatatatgaaattaataaacaacttaacaaatcgatacgcaatgaaattttgaatggtttatgtatacgtacatcgagctctcgtgttgtgcatatttggtttgataggcagtgggcatactcgcatactcgcatacgtagtagccgcataagttagttccctggtcctgctttgcacactacatgagaaacgatgagagatttaatatactctttatattaactgtaattagagattcaattcaatataattttggatcatgcatgtactcactggaaaatgaaacctccttccaagtttttctttctaagtcccgcggaccaactgacggaaccgatcccaagccctacatatgcagttgcaagctatgattaattaattattacccgagatcaacataatagcaatagattccccgcgactttggaatagatggcattatattacctgtctatcagttggaagaccttgtcaaaaatcttctcctctttattcattgagttgtacacagtgactttgcatgcgtccaagtcgaagaatgacaggacccagtggaatctggaatatgcatgagatgagatatatatgaaaatgtacatgctatatgtatgggaacgaaatttgttcgaacgacaataaaaactcactctgtgttgtacggcagtagtatgtacgtcttgaaatgctgctatgttaggagatggacgagattgtcctctgtgtctttctcttacttgtcgatcattttggtgttgattttccgagggtcgatgaacccagtatcgtagaccctccgccgtcgggccctttgaatctccattctacaacgatgaaaggaaattattattgcttatatatatgccaggagctaattattgaacgaaacaaatcgaactcaaagatactcacaaaatccatgcgctcagaagagagacgtcgagggcgtccagatggtacagatcgaagagatccttgaaatggatccagagaatatcttctccttgcaagaagtcggggtttctgatcctcgctccgaacatctctctacccttggcgctcatttccatgtaccattcatggaatttgtacatctatgtcggtagggactgcagctgctcaggcttgacaagcggtttaccgagttcaaacttgtatgccacttccgccttcaggattggtgcgcctcgaatcagctgatccacagttagaccggtgtctgaaatgaattccgttatgccaaaatcttcgccggtcaccaacggctcgacctcttggtttggttgttctccaagctgagggactggtttagacttcttgtgataggctctctgaagtgttcagtcatagtccgatatctataaggcctccttgtttgttgcggacattcccttgaagtagttcttcacgctcgggtcaataggtatcttcttttcaggactccgaggctcaagttgcctcttcacttctcctgccacataagcatcaagctcctcttgactacaatcgtacggtggctccttgtttttggtggcatcaactttcgccttcttcgttgcccttgtgcgggcaggcggtggagcttggcgagaccttgtcttgggtggtgcaggcagacacggtggaggtggaggaggcggaggaggcagaggagccggaggagatggtgcaggaggacgtggcggaggaaccggaggagatggtgcaggaggagatggcggagccagaggagatggtgcatgagatgccgcttgtcgcccagggaggatgatgtaccgcttgcaccatagtataatggcgtgtcttgtgtctcgtagatgcgtctcaccgtctcctcctgggtagtccaactcgaggtccttgtacgcggcttctaccagctcaacttcgaccctcgagtatcctgctggaatcggcctgcagtggtaagtcccggaagggtccgttgggatggccattcccgacgccaccttcatgtgatgagaggttatctattagtaatcaacctaagcagcaacttgtggaatgtacaagtcaaaaatcatcaaactatgagcataccttgattgataagttcttgaagggaatatgcagctcacatggtgtccgctgcgtgatctcatcaacggggcaggtggtttcgtcctgggtttgcatggcgtccatgctctgtgatcctacctaccccgttgaggcgcagctgctacgattgcctgatgggctgaccattgcaggaggaatgtacgactgggatcctgggaccgatgtgcggccatacgttcatccaccttccttgccatcttctcttgcatgctgagctcgtagctcgataccctgtactcaagatctgcaatcttcgcctcggtatctctcttgctcctcatccgactcctatacgtgtggatgtcctccttaaatccaatcttccacggaatcacgcctttccctcgtgttcgtcctggatgctcgggaatctgtagggcgagtgacagctcttccttctctctgtcgggtcggaatgtgccctgagaagaggcttccaccgcgtccgttagtcgactggcagcgtcgcgtatctgatcactgaagacaagggagccatcaactggcttaagcgttccaccgtgagcatagtaccagaacttcgatcgatccggccatttagcggtggccggttcgatacccctctcaatcaaacttgcctccatctcctcccacttcggcattgcgacgctatatccgcctgaccccaagtggtgatggtacttcttcttggcggcattttctttgtttctggccatcatcgcttgcccttgttgccctgtcttgtaagcaacgaactcgtcccaatgatcccttagcttttggaatacgtcgaagttcggtgttagtcccttcaagatgtatttcttgtagagatctcccttgaagctctggaactgttctgctattttcttcagagtccactgtttcactatgttcttcgtacctgcgggtagcgtgaacgtctcgagcattgtggtccacagcatctctttttctgagtccgggacaaagctgtcattatccctgcgtgcccttgttctgcgccagtacaccgtgctgacaggcacgttgtccctcacaacccaactgctgtggtgtacaaaattcttggctgcttctgctagggcactaggtcggccgtcttcgtccacctcagttacgatgtgccgaccctctatcttctttgcggcacctcgttgtccgtgtgccctcttctgtccagcagagggatgacttccagtagactcctcctcatcgtttccctcctcgttcccctccgcatcgctctccacgttcccctcctcgttcaagtactggtttggatcctcgttcccctcttcttcgttccagtactggctgcttccctctgcgtttgtatcgtatagtatctgttcctcatcgcgatcagccatgtgtgcatacaaaaaatatttgttagatctataggtcatatttgctaaccgtaatattaaaactctactaatcttatattaaatctctaataatcttatattaaaattgtaataatcatatatatatgcttagtctaacaatcttatattaaatctctaataatcttatattaaaattgtaataatcatatatatatatatgctaagtataacaatcttatattaaatcgctactaatcttatattaaatctctactaatctcatattaaatcgctactaatcttatattaaaattgtaataatcatatatatatgctaagtctaacaatcttatattaaatctctaacaatcttatattaaatcgctactaatcttatattaaaaatgtaataatcaaatatgctaagtctaacaaacttatattaaatcgctacaaatcttatattaaaattgtaataatcatatatgctaagtctaacaatcttatattaaatctctaacaatcacttctttgcatcacttgcctgcgcgaattccttcgatggctagctaccacttcggcttgacggacgatgacaacgtcttctctgcaacattaccaggaaaatgtattagtctaaacgggccaagttacatatatataatcatatatgtattaccaggaaaatgtattagtctaaacgcgttcgttctcacacttttagtacaagtgcattcacgttcgtaagcgtttcgttcacgttcgttcgcgtttcgtaagcgtttcgttcacgctcattcgcgttcgtaagcgtttcattcacgttcgtaagcgttttattcacgttcgttcataagcgtttcgttcacgttcgtaagcatttcgttcacgctcgttcgcgttcgttaacgtttcgttcacgttcgtttgcattcgttcacgttcgttaagcgttcgttcacagtcgtccacgtatcgttcacattcgttcgcgttcggtcacgtttcaatcacgttcggcaatgttgggcgcgcgcggcagtggcgtggcggcgcggcggcggcgtcggggtgccgtgggccggcccggcggcggcgtgccgcggcggtagcgtgggggcccggcggcggcgtggcgtcgcggcggcatggcgtagcagcccggcggcgtggcgcggcggcgtggcgagctcgaggcgggggcggcggcgtcaaagtcggtcgtcggcggtggcgtttgaccgcggcgtagtagtggcgtcggcaacgagctaggcggcggaggtttggagagagagatcgagatcgagagagagagagaggcagcggcggctctcacccaagagatgtggcggcggcgtctgtggcggaggcggcgaggaccgccaagcgacggcgagagacgacggcggcgtcggcgcggggttgccctaggcagtggtggcgaaggagaagccgagatcgatctcgatggaaaaacgtctaagtgttggtggagaagacgagggagcaccgggaatatatatacccccagatttttagtcccggttggtgagaacatccgggtgtaaagttcgtaacaacaaccaggactaaagaaaagatctttagtcccggttgttcgtacgaaccgggagtaaagatatctttactcccggatgttctcaccaaccgggactaaagatcttttcccgctatttccaaattctttttaaacccggttagggttaagaaccgggactaaagataatagcagctgtgtcttgaacttcattacatatgtatttctaaaatagtaaataatgcattacaattatttaaaattatttaaagtcgaacaattaatgacaaaaccttcgaaaaattattgttgtatgtagtagaataagtggataatatataataagcacatgaatgatttaaaattgttaaaaattctaataatcatatataattagcatatgcatgatattaaattgttaaaaattctaattaacatgtgtaaatagcacatgcatgatttaaaattaataaaaattctaataatcatatataattagcatatcatgatattaaattgttgaaaattctaattaacatatgtaaataccacatgcatgatttaaaattaataaaaaatctaataataatatataattagcatatcatgataataaattgttgaaaattctaattaacatatgtaaataccacgtgcatgatttaaaacttttaaaaattctaataatcatatataactagcatatggacgatttcaatttgataaaaattctaataatcatacataattagcatattccatacaacaatttatttgtatggatattcaatacatccaaaatagtttacatcgtgtacacaacaattacggcaatacatcggcggtgacggttgaccgcacgtactttctcctcactattgttccttccttgtgatcgctacgtgagtaaggggtgtcttcatttgataggaggatgctagggtcaatcgtcaccgtgaaagggggttgcccatcaaactgatcgtaatcctcatcagtcttgtcctctactccgacgatttttctttttgctgggagaaccacttggcgcttcggctcgtcaggccctttgcccttttttcctttgctagacatgtccttgacgtaaaaaacttgcgttacatcattggcaaggataaaaggttcgtccaagtatccaaccttgttaaggtcaaccgttgtcatcccactgtcatcaatcgttacgcctccaccagtcaacctaacccattggcaccggaacagagggaccttgagaggtccatagtcaagttcccatatgtcctcgatggcaccgtaatacgtgccagttgtaccatcgtgacctatggcatcgatacgaacatcactgttctggttcgtgctcttcatgtcttgggccctcgtgtagaatgtgtacccattgatttcatatccctggaatgtcgcgatcgagccagatggtcccctcgccaagaaggccagttgttggttaatcgtctcgttactcatgagatgttgtcgcagccacgcggagaaagtatcaatgtgataccgtgtaatccatgcatcggacttaccaatgtttctggcgcgaactagagccaagtgctcctcgatgtagggagccaccaatgcagattgttgcagaaccgtgaaatgggctttacggaataaattgttgtctaccgtcattattgctttccttccgagagttccctttccccgtagtctcccttcatggcgtgattcaggtaccccgattgggcaaaggtcttcgataaattttacgcagaattcaatgacttcctctgttccataccccttggcgatgcttgcctctggacgagcacggttacgaacatacttcttcagaacgcccatgtacctctcgaaaggaaacatgttgtgtaggtacacaggactgagaataccgatctctttgacaaggtgacaaagcagatgcgtcattatattgaaaaatgaaggtggaaatatcaactcaaagctgacaagacattgcaccacatcattctgcagggcttctaatctattcggatcgatgaccttctgcgaaattgcgttcatgaaagcacatagctttgttattgttgcccggacattgtctgggaggatacccctattacaactggtagcagctgtgtcattaacacgtgacagtcatgagactttagatttgtgaacttcttctccttcgtgcttattattcgctttatattcatggagtatccagacggtaccttgatgctctccaagcattcaaacatactttccttctctgccttgctaagagtgtagctggctggactcaagtaatggcttcctttctcctttggttccgggtgaaggtcaccgcgttgttccatatgcttcagatccttacgtgcttccagtgtatctttcgactttccatatacacctaggaagccaagaaggtttacgcaaaggtacttagtgaggtgcatcacgtcgattacgtggcggacgtccaagaattcccaatagggtaactcccaaaatatagagttctttttgcacatcgccgcgtgaccatcttcgctctctataggctggttaccaggcccctttccaaacactactttaagatctttaaccatagcaaacactgttttcccgctgcgatgtttaggcttcgtacggtggtccgccttatgttcaaagtgcttgcctttcttccgtaccgggtggtttgctgcaaggaatcgacgatgacccatgtacacaatcttcctatagtgcttaagatacgtactttctgtttcatccatacagcgagtgcaagccttgtacctcttgttggactgcccggataggttgctaagtgcaggccaatcgttgatggttacgaacagcagcgctcgtaggttaaactcctcttgtttgtcctcgtcccacacggggacaccttccttcttccacaacagtttaagatctttgaccagtggtcttaggtacacatcgatgtcgttaccaggttgcttggggccttgaataataatcggcatcattatgtacttcctcttcatgcatagccaaggggggaggttgtagatacacatcgtaacgggccaagtgctatggccgctgctcatctctccaaaaggattcatgccatccgtacttaaaccaaaccgtatgtttcgtgcgtcctttccaaagtctttaaattttctgtcgatatttcgccactgcgaaccatcggcggggtgtctcagcatcccgtcctgttaacgctcttcagcgtgccatctcatcattctagcattccccttgttcctgaacaaacgccttagccgtagtattatagggaaataccacatcaccttagcaggaattctcttcttcgttagctgcccgtcaacttctcctggatcatctcgtctaatcttgtatcgtagtgctttgcaaacagggcatgcttctaggttctcgtactcctcaccgcgatataggatacaatcattcggacatgcgtgaatcttctgaacttccagtcctagagggcagactatcttcttagcctcgtacgttgtctcgggcaatttgtttctctccggaagaatgttcttgacgagtttcaataaatcgccaaatgccttctcgctaacaccattttttgtcctccattgcaagaactccagagtgatatccaactttttgtgcccctgctcgcaacctgggtacaatgacgttctgtggtcctctaacatcttgtccaatttataggcccccttttcactttcgcagtcctccttgacgtcctgcaacatctgaccaagatcatccgcaacgtcgttaccatcagcatccctttcctcctcgcccgtttgatttatttcaaatccagcgtactgagcaaagtccgaaatattgtcgtcttccacttcatcttcttccatttcaacaccttgctctccgtgggatgtccaacaattatagcttggcatgaaccccgactcaaacaagtggaaatgaatagtcctggatgcagaatactttttctgattcttacacttattgcatagacaacaaattaaacccttttgcctgttagcttcggccactttcaaaaaataatgcacgccatcaataaactctttggaccgccggtcagcgtacatccatttccgatccatctacatgacatgaaaaaaaatcgtacacaaataattattcgtacaataatgacactcatacaataattataaaataattacaaactctttcaacagtcacacaataatgacatatcattattcatacaaaaattatgaaatattacaccaaataattcttatttactatttctaaagttttaaaataatattaatgtgttgtactccttttaattttcattttagtttgttttctattattcaagattaacttttgctatattttccttctcaactattttataaaaccttctttagcaaataaactaaatttctatatattttttattccccacagaaattttctctctcatcaacttacaacaaaattttggagacaaaaaagtgtgctaaacatagctccaaatgtaatatgacaaaaaaaacattggaggatgaagttgctaaccttttaggcacctccgatttgtatataatcaccaaaataaatttactagaaattttggcatgacctcccctcttttttgaagaaattttaaagcttgctcgggctggaggaggaagaagatatatatatatatatatatatgcccgttaccctttttaaccgggactaaagatcggtttttgttgcaaccgagactattgtggaattaggccgaccgacgaaagatggtttctccaccagtgtggaaaaaaggtgatgcccatgccacttttgcatttcagcacatatgaatattctttatcctatatctcctgtaaataaaagtatttaaaacaacctctctgttgatctaattaagcctagcaaatttgtgacaaatggcatggaagttttcagttgagttagatcatactcctaaccgacaaaggtgctctttctttttttttccccttctgaaaccaacaattactactactccgtaccttttaatgcttctccacgtgcaaccattcaaaatgagagcacttcttacacgaatgtataagacaattccaattcaaatgatctccaaacacatacgaatcagttattcgatccttaataataaattaattagaagctaatatagtactactattctatacgctaaattaaaatatttggaaataaatagcgctaagagcaaatatagataagtacaaaataggattaaattataagggctatatcctttttttttctattttcatgtttaaagaaactatttttgctcataaatattttatattggatcctccaaagggtctatgctggcaaatgaggccgaatggaccttggtaccagaaggccattcaaaaaaaaattaagaaaggataaaagagaaaattctagacaacaattatggtcagataaacacaaaacgtcatctgtccttaaacaaacaagtatatatccaaataaaaaacaggtcatagtcacgcgaatgcctgatttaataggctagtgtgtaatgaatgcgaaagcggaggcatgagaagcgagggtaaagagtcctcgggttcacatcttttattataatggtattatgtatgaaaaagataaccttaagataatgattgcacttgtaaagtgagctatatacattgtggaaaatagcattagcttagagtgcaccttatgcttaagttctaccacaagcaaaaagaaaatattttttctctctcattcactttatgaacaagagatgaaacaattatttttccattctatgtgggccatcttgtggctaaattctaaccatagcattgtggatatggctataacaatgactcactattcatagggcccaccttaaaattacactacaccataaatattgaggatgcccttattatatatattgatactctctccgtcccaaaatataacaacttttatcacttatgatttatctcaaaatataacaacttctccaccaatattctcttcccaactaatcacaaccctccaccgttaacttttcccacattcttccactgctcatctaattacaaccctccactacttctatctattttctaataaccgtgtccaatcttaaaactttttatattcttggatagagggagtatatgataagctataaggacgaaactgatataataatagcgatattaatcaagacgcaaacacctgctctagtagttgtagatgatcatgaccggggacctgatttggatcggtaatcggttggctccccaccggaaggaaaataaataattaaaatggctaactcttgtgtcatcactgggctctgtcctccactcctcctcatcaacaggtcggtccacctcatcagaacgagtataatagcatgctacaaattatgtgtaagcacatataaagaaaagaagagaagagcacctgtaaagaatttaagaaagttttctctatgaagtttatagaatgaagggtaaaattataacgtgggatgattgtaattggttaagatgaagaattaggtgaaaaaaattaaataagacagttacgatcgaatcaaatatggcgagtaattggagaatgagttacagtttgaaaaaaaattaaacacttgaaataattatattctgagatgaagagggtatctaataagttttgtcaaggtgatggaaggagccagtacaaggtaatttgtgattaaagagaggtatgaaattaagtacgcttatttccgatgagttgttaagatgagaccccgtttgatttggctataggggggaacaactgaattgttcgtataaccatagataatatgtttatatgtattgtaacagttagatcaatttgtgagttgcacgattctctggtattagtttgtcaccgtcagcattactaaagctagtcgaagatgacagcaaaatgggacttaactggatgcggcaccctgacgagacagcagcgaaatgggacttgactggatgagggcaaatacaggcgtttacagatgaaaaaaagctagtcacagatgagtactccagaaaacggcaccctgacgagacagcagcaaagggggactctggatgcgggcaaatacaggcgttcacatatgaaaagataggaagggtgtgtttagttcaggttaaaattagaagtttggttaaaactaaaacgatgcgatagaaaatttgaaaatttgtatataggaaagttttgatgtaatgaaaaagttagaaattttttaaaaaaatttagaactaaactcggccgaagatttgtctccaaatatatatacagtatatatttacaggagtatctataactgtaaaggtcaatgttaacatcagtggagcatgacaatctaccctatcccctgtcagataggttgagattaacatcatctgtgtttgtactggttaagagatcgatagtatccatctgcagttactgtctagtgtgctgtgcacagtttatatggattaactactgcccattctcttctgacctctctttgttttagagggggtggacaaaaaatattatatggattaattaatttctcattcaatgagaatggttgaagataaggtggttaagacaagattggatgaaaattaaaatgaaaggtggttattggtggatataatactttataaatagatataatatcttgtgacaaagttttaaacgtgaaaaatggacacatcttggaagggggggggtacgtatataaatttcaggacaaaagctataatacattattgtcatcttcatctcaccaaatcccatcatattagattacaaaatcaggtataaacgtatcaatttaagcaacggtgtcactcttatttgaattaatgggacataataaaattatgccagctgaggcagcaagtactacacattcttcctaagagcatcaccaacataatgtgaataacccacccaaaattttgtttttgtttcctaaattgaaaatagaaagtgaaaaaattcatctctttgaattccaaaaagtaaaagtgaacccttctatctagttttcctctattaccatactgaagaggatcacgctatcctccaggcactcctccttgccccaatgctgcatcgatctccctcgctccatgccctgacgacgatttttctcccacgcactccctgatcgatgctgatctgcctccccgacgccattctcccccaccatcccctgtcagctctcctttccccctcccctctatctcccattgttgctgtcccacctctccttacatgtcctcgtcgtgttaaaagacaaagagatgagtcgtcgatgcaactccctccaaatgctactggatgatgagtctttgttggatgacaacaatgaatttatttttgagacggttcaaatagtgtacgatcagaacatgaaagaaccaatgcaaggtgggtctgtattcaggggcggagctagtgtattgaggggggtgcccaggaacccggtcaaaaattttttttggagctatacctaacttattttcactatatatgcacccctcaatacatatttagacacttgtattagtttaaacttgatataaagcagagtaaattaaacaagtggcactcccctcatctcgctctagctctgcccctgtctgtatttggacatgaggtgattaattgggtatgattggctggtcattggagactatacgatgatcatttttctgaagaacctataacttcctgtttattttagacgcatgtattagtgaatagtattattttttcaatcttgatttgaattggtgatgcacatattaattcttatttctaattattgtgcaggtttagaatgagaagacctcttttttacacataatgattattgttaaagtgcatgatgattattatgtgaaaaaataaaaatatggctggtgtccttggactatcatgtttctaaaaggtaacattagtgttacgtatggatttgataaagaatggcaatgttattatttttattttgtattgatatgtgtgagttaaatgaaaaaaaatattccgtaataaatttgtttttagctccatttatttgtctttataaacggttccttttatttatcttcaaatctatagttttgtgatatatcttattaaatatgtatatttttttataatctgaccaaattacttagggcccctttgaatcaaaggatttatgtagcaattttataggattcaaatcctataggaaatttttctatttggccctttgattcaaaggattgaagctttccaaatcctatgaaattcctatggaatgacacattgcatgtggattttggagaaaatttagcaagagctccaacctcttggaaaatttcctttactctatctctctcatccgattcctacgtttttcctgcgctctaatcaaacgaccattcctgtgttttttctatgttttgcaatactctgttttacactttaattcctgtcagaatcatgtgtttttcctattcctctgttttttcaacactgcgatttaaagaggccatatagttttattaaatttactctaacttgttttttcgtgcgggaatacctctggatgactgatgacgtcagatcacctagaattgtcgataattaatgcggtcccttttcccgtcatgatatgtgaatagtgaaatctcaccgttcggtgaaaagaacatcagtacttcctccgtatcgtaataagtttatttttattttatttatttcaaaataagctcattattaaataatcattacatcggagtttataagaatataaataattatattgtgagaagataaaataaacaaatagttgtaataaaatttgataaaatagggaaaaaataaatttgtttttgaactgaggtattaattctggaagaaggaaatctcctaaagaacattagtattcacacatacctttcactccttgttttctctctttcgatgagtcatgaccgagccgtccttgatcacttaatcatgatacggtgaaaaacatactagtccacacgagttcaagggggagttgttgaatgcttctccgtcttagaataaaatcatcgtttatcctttgtcctaaaaaagaattaacttttgaattatcattacatcaaagtttataaaaacagaaaataaatatattgaaactagataaagtaaagaataattgtatttggatttaacaaataaggggtattttagttttttttaattttgtgttgatataattaggatgaataaaaattaagaatattctgagactgagagtatggaggtgaaagggtagcttagctatgaacccatgatcactactagtatttggagattttaggagtactgttatacgtacgattcagctgtataacttactagaaaagtgtccgtgtattgcaatggtaaaaaaaaagaaaaaattgaggaaaagttgagaaagataatgtacattgtgtaattaattgaaataccaattttccggaatatttgggtattttttaagtacgtagtagtataattaaattaatttacaagcaaagtaagcgtgagaaaattaaccatgattaataatagtctttgaaaatttcttggaatttctagaacttaattgctaattttgataatacaaacatcatctttatttaaataaatctaaataaaagtccacatttctcttcgggtcattttccgcccattttcttcttcagcccgcaaccgagcggcatgctttcctctcttctcctcccctccacctcggtccgcaagcaagcgtccagcccaacgtacaagtctaattagtcatcccaactcctcctctcactgtcgtgtgggccccaagcaaaattctagcctaagcgttgtgttagacccgctagcccgcgcgcggtccatcaagcgtgcatggcccagctgatgctggcctgacgtgggatcgatctgagccgtttgtttttgatggatggcttagattggttccaaatcaatcaaaaccaccggtacaaaaaaaacctaaccctaattcattttccctctcccacttcccccaccgtcggctgcctctccctgttgcgccgcctcttcccctctgctgctccctctccgctgcttcccctccgcctcctcccaccggcggcgcctcttcgcctctcctgtcctctccctaacggcggcgcagctccccatctcttctcctcccgtgttgccagcacagcgcgatgacgacaagagtacgacgcggtgcggcgacggcgggggtacggtgcagcgagggcagcaatggacgtccctccccctctccttctccctgtcggccttgatggcggggtatggtgcggtgacggcaacaggcgacgacggcggtgatgccgcttcctagcgaagggccggacgaacccgcgctgctcccaccggtggcttaatgctccatgaatccagtatgtgattcgaattgaaatttcccgtccgttctcttttggataactgaaggtgactccgcgtgcaagcgccgacggatgaaaacggatgaaaaatttaggtgacgaatgcaaaattaccgattttttaagaagttaagatatacaactagagatatataatcatagaccaataaaaaagaacatgttcatatgtattgcagccgttgctcaattttaattatatgtgagtcggacaattacctggttttagtttgtcaccgtcagcattactaaagctagtcacaagttgagaagaaaacgacaccctgacgagacagcagcaaaatggcgagaaggctacatgtgtcgcgcgcggagagagagttttccgtttttttgcttttgaggagtcaagtgaggaggacgaggattttgatgaggatgagtgatccactctgtttttcctttttggtgccttgatgccaaagggggagaaccacctatcaaaaaaaaaaaactatcccctttcgtgatggctagtcgaaccttgggcttttgtgtcatgtttaaattctttattatgcatgtttatgtcttgttgaactctataggcttgaatgatgttacgtggaattatatcttatccatgcttaaatgtgtgatatatcttgtcatttgcatatgcatgaggttatattgtcatttctaatctattgcatagattgagggggagctctcctattcatttcaagcatatctttaggggagctccaccaaaatcctaatcttttattatttctaattgtgttgtcatcaataatcaaaaagggagagattgaaagtgcatctagtacccctcatttattttggtgttgatgacaacacaattagaagaaaactaatgctttttgttgagatgaatgcaaggataaaaaaggagtggaacttgagtttaaaagcattgtggcatcttttgtggtaatcgtctttctaaaccatgtatatcttgtgttcttgagagtattaggatgccgtactattaagagggataccacatgcatataattggtagaacactagtgctcaaaatcctttacttgaagtgttcttgaatttatcctgttggactatccgattttgatcagactatccgatgctcagactatccgaaatttcatagaactttgatctctgtctttggtctaagtgttggctaaaaagaattggactatccaatgacctagagactccgaaattcaatggaacttgagtctctgtaagatgatgaaattcttgcttcaaaaataacggaatatctgatatgacatcggactctccgattgatcggattgtccgaaattctccagaattttgtcctctgtctcgggcttgcttgggggtcaaaaaaaacattagactatccgatgtcacctcggaaagtccgaggtgggatgaaaagagtctctcctaacggccactttttgggggatttataaatacccccaccttttctagggttacccaactcattcattctcattcactttgggttgagtttggtgctaaggtgctttggatctttgagctctttctccctctttcaaatacctcctcgttctttgtgtggtggatcttgttggttgtggatttggtgtttgaggacctagtgtgtgtttcactcgatcttgagcactagggtttgaccaagagttgtgtggtgtttgttactcttcgaggtcgaggactcctagacggctaggtgtcactcccgagccaccgatctacgtgtggttggcagggagaagtttgcgaaggccggatcttgcctccacaaggaaagagataccccttagtggaaggaggagtgcttagtacaacctctttaggaaagggttagcaaagacctggctcttagtgaactcctcaacggagagtagaatcccctcaaggatttgaactcctggaacaactccgcgaacttcatcgttggtgatctctctatatcctctctttagctttgcttaattgtgccgctatagatctagtcactgtttgcgctatactcttgtttgtgtgatagatctacttgtggtgactctttagtggatcagacagtctgatccaacattagactatctgatattttcggatagtctgactgtggatcatactttcccgggagcttgtggagtattacgttgctgcattgttccgtcggcttgaccacctccattgttgggagcggtctcttgttgttgagtatattattgagataatgggcgtatgttggcacttgcatggcgtccaacaacggcacgttgatgtggatcttctggattacttcaacaaaacgagcgaattgctcgtccactgacggtttcctacttcgttgagggaacaacagcaaccgtgtgtcgcagtactcttgcggcactgtcttttctagcggaacttccttgtcagccgaatcattagatggcacttcttttgatatcccattagttcctgcatggttaggatatggcggatcacgagtggacttacctcccctcgtcatgaccgccttgacattttcaatggaggagtagggttgccccgggatcctcccagtttcatttgcagggactaaggatgccaactgagctagctgggtttctatcattttattaaagctcagctgattttgaaaagcagaagcaaagccatctaacttgacatttatgttttctaggaccttgtcattggccgcaagttttctgcttagtgcatcggtggttttagcttgtgcaaaaatgagatccctcaaggagggctggttagaaaaattaccgttgttgttacctccttgataatatgggcgtggttggttccacccatgacctccttgtggacgatacccgttgttgttgttgcccatgtatatcgcctcctcacgggtttccgggcagtcattcccagaatgacccgtgccgccacagacctcacatgtgacgtgagagtccaaggccttgatggtaccttgtggccatttctcgtggtcgtccaatcgcttcatgaggaggtccagcttggcagcaagtaactccgtctccttgacggtgtgcatgcctcgctgacgggtctggtgtcgttcctcgctccaacccatattggagaccatcttctctattagatcaacagctccttgaaccgttttagagaagaaagctcctccagcttccgcgtccaggtgatcgtgggacatcggggtgagtctattataaaagttctgcattatcagctagtcatccatcccatgatgaggacaggcggctacgtactcctgcagtcgttcccatgcttccggaatagactcatcccttgtctgctggaaacttaaaatccttccacgaagggcattggtttttgcccatcgggaagaattttgagaggaatgtcgtagagcatttgtcctaggtattgacagcagcacggtttgcatagtgatgtgctcgaggatgtcccgatctttcgatgagagggataagtcgattggacggagtgacattggcgatccgactacaactatccagggatgctgcgccttaacaatcgttacacgaactctagaggcagtcgtgaatctcgacggatgcacgatcagcccaagcacgagggtatttgttcctgcaagcaatcgagaaccagcaagaacaagatgaacaagcaaataaatttgcaaatcaaagatgttggattgaatcaatagaagtaacaagtggggttcaataacaagcaatctagcgatctaatcgatcacgggatcaactcggcaaagtagtgacgctatactttgatctaaacaaaacccgattattcttggcggtggagaaagctataagaagaggaagaggacgaccacaggagtgctggggtcgttctctcaccctaggacgcgtccctaatggacccaacttgatacaccgcccattgggcccaaagaggtgatgcaacaccgtggacagaaaaggactcggtagtaaaatgaagattgcggccgccccagaactgatatggaaatgaggctggatccatttgaaagtagacttgacaagctttccatgaagtacttgcacgcccaaatcggagttcgcatgaggtcgtggcggccgtcagaagtttgtgctgtgctgcagtccgaatccatcccgtgcgattcctctccccatttgataatctccattgttcctgatagttgagttgacgtgcatgatcgcgggtaataggaccatgaagttgtacttgtggaagcgtggatgtaccgttggtgttgatgtcctcatcatcctccctttcttgcatttgaatcgtcctcgactcaagttcatcttctgcgcccaaatatggcttcaaatctgcaacgttaattgtgagactaaccccataatctgcaagcaaatcaagcttatatgcattctcattaattttggctaacactttaaatcgaccatcagctctaggcgtcaattttgattttctcaagtcaggaaaccgttcttttcgcaaatgcaaccaaaccaaatctccaggttcaaaattcaattcccttctacctttgtcaccagcaaacttatacttagcattcatgcgctcgatgttttctttagttgtctcatgcagttttaacatcaactcagcatgttgcttagcatcaaaattcattttttcagaagatggcaaaggcatcaaatcaatgggagcacgaggcaacaaaccatacacaatctgaaatgggcacatctttgtagtagaatgcaaggaacgattataagcaaattcaatatgaggcaagcattcttcccacatcttgatatttttcttcgaaacagccctaaccatagtagacaaggttctattcaccagttcagtttgtccatcagtttggggatgacaagtagtagaaaacaaaagcttagcatcaaaattcattttttcagaagatggcaaaggcatcaaatcaatgggagcacgaggcaacaaaccatacacaatctgaaatgggcacatctttgtagtagaatgcaaggaacgattataagcaaattcaatatgaggcaagcattcttcccacatcttgatatttttcttcaaaacagccctaaccatagtagacaaggttctattcaccacttcagtttgtccatcagtttggggatgacaaatagtagaaaacaaaagcttagtccccaatttagcccacaaagttctccaaaaatggctaagaaatttagtgtcacgatcagaaacaattgtatttgacacaccatgcaagcgaacaacttctagaaagaacaaatcagcgatatgagaagcatcatcagttttatgacatggtatgaaatgtgccattttagaaaatctacccacaaccacaaaaatgatatgacgccccctcttggtcctaggcaatcctaacacaaaatccattgaaatatcttcccaaggaacagtaggaacagggagaggcatatacaaacaatgtgggtttaaacgtgacttagactttttacatgtagcgcagcgagaaacgaatctatctacatctcgtctcatctttggccaaaagaaatgaccagcaaggatgtccaccatcttcttggcaccaaaatgccccatcaaaccacctccatgtgcttcctacaacaacaacaagcgaacggagctagctggaatgcatagcttgttagctctaaaaacaaacccatcattcaagaagaatttgttccatgtctttccatccttacaatgcagcaacatatctttaaaatcatcatcatgcacaaattggtctttaatcgtttctaggccaaaaattttgtagtcaagttgtgtcaacaaagtatatctcctagacaatgcatcagcaatgacattttccttccctttcttgtgtttaataatataaggaaaagattcaataaattcaacccatttaccatgtctacggttcagtttttcttgactacgaatgtgcttcaaagactcatgagcagaatgtatgacaaatttcttaggccacaaataatgctgccatgtttctaaagtgcgcacaagagcatacaattaattatcataagtagagtaattcagaacaggcccactcaatttttcactaaaatatgcaacaagttttccttcttgtagcaaaacaccacccaatccagtcccactagcatcacattcaagttcaaaagtcttattaaaatctagaagttggaggagaggtgcatgtgttaacttatctttcaacatgcggaaggcgttctcttgtgatgtgccccaagtgaaaagcactcccttctttgtaagctcattcaatggtgcagcaatggtgctgaaatctcgcacaaaacggcgagaaaaccccgcgagtcctagaaagctccgcacctgtgagatcgttttaggaatcggccaactctgaattgcctcaaccttagcttgatcaacctcaatcccctgttgagtgacaatatatccaagaaacgagactcgatcggtgcaaaaattgcacttctcaagattaccaaacaaacgtgcatcacgtaaagcattaaaaacagcacgtaaatgatcaagatgttcctccaaatatttgctatatataaatcagaatatcatcaaagtataccaccacaaattttccaatgaaaggacgcaaaacctcattcatcaacctcatgaaagtgcttggtgcattagttaaaccaaaaggcatcactaaccactcatataacccaaattttgttttaaatgttgttttccattcatcgcccaacttcatacgaatctggtggtaaccactacgcaaatcaactttagagaaaacagtagagccactcaattcatctaccatatcatctaacctaggaatatgatgatgatatctaatggtaatgttattaatagctctacaatcaacacacatacgccatgatccatctttctttggaaccaaaatcaccggaacagcacatggactaagagacacgtacgttccctttgtcaagcaagtcctgaacctgacgctgaatctccttggtttcctcagggttggtttggtatggcgcacggttgggtaacgatgctcctgggatcaagtcgttttgatgctcaattccacgcaccggtggcagccccggtggcacgtccttggggaacacatcctcatactcctgcaaaaggttagtgaccgcaggaggaaaagagagaggaatattttcaaaagaaaacaaagcatccttgcaaatgaaagcatagcaaacaatatcacttgtgtccaaattgacaatatcagatttagtggtaagcaaacaaggaccattcaatttaatcacactatccttgcgacggttagattgagaacctttcaaattatggtgcacttgttcttttgctacaatctgattttcacttttagcatgctcaacatttttctctttctcagctctagcaacattattctcaaaaacagcttcaggagtcaaaggatgcaacacaattttctttccattatgcataaaggagtattgattggttctaccatgatgcaatgtgtctttatcatattgccaaggcctacccaacagcaaagagcaagcatgcataggtacgacatcacaatcaacaaaatcacagtaagaaccaattgcaaaatttaatctcaccaattgtgttaccttaatgcggccactgttgttgaaccactgaatgtagtatgggtggggatgtggtttcatctgcaaagctagcttcgtgaccatctccgtactcaccaaattcctacaactggccccatcgatgattgtgcagcaggaacgcttgtggacgacacacttcgtctgaaaaaggttatgccgctggttctgctccgctttgcccatttgtgcactcaagacacgttgcacaataaggctctcatattggtccgctacatcagccccgatgtgtttctcatcctcgctagctatgttgttagctacaagcaatgtaagtgtatcttcatcgaaatcactagcagacgagtactcaccatcagccttgactaccaaaacatgcttgctagggcagtcacgttgcatgtgcctaaagcccttgcatcggtggcactgaacatctcttgttctacccgtggaagcaacagaggaggcactcttggtgggcttttctgcaacctctgaagcacgagagcgggccgtagaaggtgttggccacgctttgttgctgttgctgttggagggtgcagatgtcgatgtcgaaactgatgaacgatcggtgggggcagcgccactccgagccgtccatggagttctacctgcaggaatgttagcccttgtttgtgcacgtcatccctgcacttcccattcagctttacaggcatagtgaaataaccgagtcatattattatactctttgtaactgagaatatcataaatttcccgatctaagccccccaaaaatcgagccatggcagcctcctcgtcctctactaacctacaacgtaacatacccatttgcagcgcttggtaatattcttccacactagtaccaccatgtttcaattgctgcagcttatttaacatgtcacgtgcataatatgaaggtacaaatctagcacgcataatttgtttcaaatcatcccaagtaggtggcaaagcatttatatgagtacgacggtattcacaccaccaaacagaagcaaaatcagtaaattcactggtggcagccctaaccctcttatcctcaggaacatcatggcaagcaaacttttgatctactactaactcccatgaaagataggcatcagggtcatacttaccatcaaaagcaggaatagtgaatttaatcttaccaaatgaatcatcattatttcgtacctcacggcgtggccgacgatgagccacaccacggcgattgaagcgatgtcgtcgctggtccgcatcatcctcagaatcaccaacgtagtcatggtcatccatctcactaccatggtgggatgctcgggccatctcatcaagacgccacacaataccatcaagactggtgttcaccgtcgcaacagaagcttccaaggtggtaagcttggtgttggaatcaatttgcgtgcgttcaacatgaccaagcttttcattggtgatacaaacatcctcctcgagcccttgtgtgcggtccctcactaacctgtcaaaatgctaaataattccttttgtgcggggtgagtgggggttggaatgctcaacacctgacatggttagaaacaaaataaacagacaaaacaaatactatggagcagcaaatgaaaaaggaagaagaagaagaaaaaatcctacaaaactagttggatgtggttctatctatcaagtcactcactctcaacctgttccacaagctcttaccaattctcatcatgccaaacaggaggtgatggcaaccgtcggacttggacgaacctctggagaaggtgtattgatgccttggtagctgaatccctgtcaagtgttagtcgaaccggtggagctatgggtgggctgtgtaatgagtcaaagaaaaactagaaaccacgttagtcaaagcaagttgaataatctctcaaggttggtacaatgctggtcctaggctagccgaagtagagacacgagcctaaccacaaaggacgccacaatacacaaaccaaacatgagcgatgataggaagatggtggtgacaacactgaattttggggggggggtgtactcacacacaagtcagcttctcatctcttttctttctttcttcttttttctttctcttttttttcggtgcggcttttttttctcttttttttgcacctttctgccgtttctcactcttttgtattttctttagcaaaaacaactcaaggacctcaatgtaagattatagggactccaatgtaaatataaaaaatacagggactcaagtgtaaaagtccgaaccaaaaaataaaactatacaaaaatggaatgctaaatttacaccagttccgtttttccaaacagatcttgaaaccgacaccaaacgaaaattcaccaaggtatgtagctaactcacggtatagattcaaaccgagatacgagagggggagtcggacttgggagagggggatggaaaccgacgcaagggggtgggactcggttaaaaaaaatgaaagaaggaaatcgattcctttttatctcttctgcatggcgcccaaatagaaaccaatctacaaattgtaagactccatccaaaaaccgatctagtatcccctttctctcttcttcctcgcgcaacagacacaagcacagccgaaacagaaacacggccaactcggcaaaccttatatgcaacttgacaactccaaaaccaaccgataaaaacttctaaaatctactaaaatagaaccgtggcagcgaggcggttccgttttcgtagatcccgacgacaacagaagtggtgatggctgagatggtggtgatgaaagaaaaaaatggcgatgtgcggtggccagaactcgaaactctaatcgactaaacactaaaaccaacaaattaacacaaccgatgcaatcgaaaactcaacaagccctaactaagcagtactagtaggatcatagaaaactaatctaatattttttttggctttttctggactgtaggaataagaaaattacgaaatctctcaccgagcaacttgggctctgataccacctgatgtgctcgagggtgtctcgatctttcgatgagagggataagtcgattggatggagtgacgttggcgatccgactacaactatccggggatgttgcgccttagcaatcgttaccccaactccagaggtggtcgtgaatctcgacggatgcacgatcagcccaactacgagggtatttgttcctgcaagcaatcgagaaccagcaagaacaagatgaacaagcaactaaatttgcgaatcaaagatgttggattgaatcaatagaagtaacaagtggggttcaataacaagcaatccggcaatctaatcgatcacgggatcaactcggcaaagtagcgacgctatactttgatctaaacaaaacccgattattcttggcggcggagaaagctataagaagaggaagaggacgaccacaggagtgctggggtcgttctctcaccctacgacgtgtccctaatggacccaacttaatacactgcccattgggcccaaagaggtgacgcggcaccgtggacagaaaaggactcggtagtaaaatgaagattgtggctgcccagaactgatatggacatgaggctggattcatttgaaagtagacttgacaagctttccatgaagtacttacaagcccaaatcggagttcgcaggaagtcgtggcggccgtcagaagtttgtgctatgctgtagtccgaatccatcccgcgcgaatcctctccccgtttgatcctctccattgttcctgatagttgagttgacatgcacgagcgtgggtaataggaccatgaagttgtaattgtggaagtgtggatgtatcgttggtgttgatgtcctcatcacatagaaccactgcttcgctctcccgagaagggagaacggaaacagtcgcagcctgacggtgtcgggattgacgcccttgatgttgtacgtgctacagatctccaggaactgttgcagatcagcattggacccctcattaggctcaccacagaacgggtttgcctgcgcaatcgtgatgaggctggacttcaagtcgaaatccacgtcccctatgttgacctgcggcccaatggccacattgtcagcagagggagcagcgaactcgcggagagtcttattagccatagtcttgaaggtcggtggcgttggtacggctggtttatctatcggtagagttttctgcggagcagcgactcacggcctaatgctccgaaagaaagcttctggattttctttgaagtttttcggcaagttgaaaccagtcatgcactaccctgttttcacaacaaaagtgaaaacaaccaaggttagcctgcaaaggaaaatgattatacagaggcaaatataaaatattagttcaagtagtctctattatgaatctcctccggcaacggcgccagaaatgcttgttcgtatttcttaacgacattactagaaatataattcccagcaatggcgcaaaagtacttctgatatattatggttacagagttcatccgcaagcccacagatataccattgtagtgtttcacccgagagtattccaagggtatcgtatttattttatcccgtggaaagatcatgtagagagaacttgactaataatttatatattacttgtgataatcatattctaagcaggggttaagataatccaagggtagagtgacacacaagcattaactactcattctcataatatatcacctaagctaagtggaaagaaaagaaaagaaaatctattcctatatttctaatatacatagtatacatacattctagttaaccgatatactaactaataccctctatccgatgccctcctggtacttcgagaagccactcctgactgccgagttccttacgacagcccgtcatgaccatacaaccggggctaaatacggaggagtatcctccctagggaattaacttaggattatataccggcgcggaggaatacccgtactgagctgtcactatcagcagcccacctctcattcgcaatatataaccccaaataatgatatcccgtaatctagacaccacgtctaaactaccagatactactctaatatcatcgtcatgacatagagtaattgcataggcaaacattatacccgcaccaaagcatctcccagataagctagccgtatattcagtataagatgaacataatgtaaagtaggtactcatatactcggaatgtatttcaataccataaatgtatttagaagagtattctactaaaagtacaaggcttggcttacaaaagagaagagaaaagctactagagccatacccaaactcttccgaaggcttccggactcctgatttctactatgttcctattccaccagctagatactactaaactaaacttgagataaatgagagagctattgcttgaggtgtgtgagtgaagtgaggatgattgctccttttatagcctcccaatgacggttgtaacggttggaatagtcggtaataccctccaaccgtcattggggagcaatctcagccgtccaggagaaccctggatcaaacggagctgcggtgggttcggccccaacccatcttcggctggcggcctcctttgttgtcctcctccgtagacttgtgaattttggcccaatgtgtcgtgttatttctgagttcttggcccattcatacataagtctggttctcgacatcatccgattgatttatcatctgagttgatgttgattctcctccactttattgtcattctctgcaaaaggtaagtatacctaatactagtggaatattattattctaacatatttatgcattgcaagcatcactagttctcccctattttagtaatattgacggtcgaaactgatcgaactgtcaacaaccagctatagctggctattgctgcagctaagctcattagcggttttacaaaaactaacataaattttgcaattcttgtacagtttaaagagccaagacacttgatattacattgaatagttcaataccacattcaatatcagagaatcatagcaaaaaaatcttgcacgtctcttgttaggaaaaagaaaaactagcgaagaatagggagaggatttgtgctgcccagcagccctcactgtcttcggcacaactgcctccgtagcagcttgagggagaatagagaagagtggggagggagggattggtgcagctaccacccatcacagccgccgcagatgcttggtgctggcatacgcacagccgccgcctccgggcgccaccgttgcggcctccatgtggagctgcaggtcacagccgctgctgttttcatcgccgtcgctgctgcaggttgcagccgccgccgtcgcctccaggcacagccgctgtgcctgtttttcgaggggagagggtgagcgacagagtgactgtgaaagagtgatagagttagggttgaattgtttctatatgccccattgtttagttttaggctctcagcccaccaagttagctgccgctatttaagggcccatttagcagctatagccagctaagagcagctaatagcgccatagaatgtgtagcgccaaattggacatatcttagtggttgcttctcccagcggctatctccggcaatagcggcagctatagccggagatttaaatccttggttccaactcctctccatcgtgttccgcacgtacgcttttcaaatggttaaacgttgtgtgttttgctaggaaaaggtacgaattacacccttgaactatcatgggcgattgaattaactccctaaactcgaataccggatattttacacccttaactatacaatcggacaaataacctccggcttaattcggggtagtttcagttctacgtgagtacagtcagcaaaatttttttaaaaaaagtagtgtgggccccacctataagactctcctctctttcccctctatcctctcaatctctctctactctctcttcctaaatccactatcccctctctctcctccctcccctgctgcagtgagcggcggtggccagccggcaaggcgcgcacggcggcgcgccctctctctcctcccttcccttgctgcctccgcggcgccctggtccggtctggtccggtcgctgtccgggcgactgctcgacgccgatgaggaggaggaggtgctcctttcccgacgcaggccgtcccggggtagatacggcctctgccactgtccccctcttaatactattgatttaatttcagcgagcagcgctctgtctgtctgatgacaagttaatcagtttcttgtttaattagtttagttttctcttgagattcttcctggtttcttgggctttgaaaccaagaaatgcagtgatgatgcataagcacacactgattaggcatgattgttgaaggtcgcgaagtagatgaaaagacaggacatatacagacagttaagagcgccatctcgataaacacattctctaaggcggtcagtttaatatgcttgattacataaatatcatcattttcataagcggctatatatcttaagcgactgctttgaaaaatcaaacatttcgtaaggagatcacttaagactgtgtaaatgggggcattttcatatgttacatgtgaaaattggtttccacatatggtcccttacgcctaccctgatgtactgtacaagcggggcgttcctatacaagcggggcgttcctagtacgcgcgtacgcgccgcgagcagaactagcgcgcacgcggagcacgttcttggaaggacgcggtaccataactaactctgttagtcaaggataatgactgtaattaagaatagattttttattttcttaggataacttttttactaatagattgaaaaaatttgagttacatttgaaaacttttgacttaaaatttaaactttgatctcaaattttgaaaactttcaactcagactttgaaaattttcaatttgcaagaaaatttttgaaaactttcaactcgagatttaaaaactttcaactcaaatttgaaaactttcaactcgagaattgaaaactttcaactcgagatttgaaaactttcaactcagattttaaaactttcaaatttaaaaaaaatcaaaaagtataccaaaaagatgaaaaatacaccgaggggagggagcccaatagggaaaaaatcgcgccaaaaaaaagagaaaaaagtcgcgccaaagaaaaaggaaaaaatcgcgcaaaaaaaaagcaatgcggaaaaaaaatcgctaaaaggaaaaggacacgtggcgggtggaggggcacgcgcgccagatacggatctggcgtgcgcgcgccaattagcaaaaccggtacaagtgggtgccattacgtactatgcctgttgtgatgtgcggtacagggtgcctacaaaaaatcgcttttgatattgacatgaagctgaaattaatgcactgtgtaatgtcagttatgcagattctgttagcattgtgtttagttcacactgaagtttggaactttggttgaaattggtatgatgtgatagaaaagtttggtgtgtatgaaaggtctgatgtgatgaaaagttggaagtttggaaaaaaactttagaactaaacaggaccttacttgattgtacatcaatttcaagtaaaaacacgtgggatgaccatttaattcgtacctgaaagctttgctgcaatattgtactaccgattcgatgatgcgagctccaaaaccaacctgcggacttgttcttcttttgtactgtcaagctctggccgtcatgttgtcatgtacccctcttcgtactctctttctttctgccttcggccggtgtcatccttccgctggccctgcggaagaaaaaggagagtacatactgttaacgacgaaatttgataagactaaagtcatcatcggcttagagtcagtatcggcttcagagttatagaatcagccgatgggagtcgttaaatcgccagcaaccgtgtcctcaatggagtcggatcaactaaagggaatttatccagaagagtccgagttcaagaaggatacggcatggcaagttatctattaattaggaatagtttattagttttcttttatctttaggaaagtgtgtttagtgtccgatgaggactttatcttttccttttatctttagtttctttcttgtccgacaaggactagtatctccctgtgggtataaatatgtacacccgaggtcattataatctatcaatctatcgatgaatacaactactctcggtgcatcgccaccctctttaccgaggtttttacttatcatccgacagaacctggaacctgacgcggggctgcatcggctttcgatctccggcgaaggggtaagtgctacgttccgtcggcccagtcgattgtatcgtttacgtcggcgtcgttcaaggctgcatcagtacattcgacctcttggattgctccggtttggatgatatatttgtctacctatttatcatatgtctctgttaatctagtcttagcatatcaatttagctctattggttgcttctcgttttagggtttctgccagtatcggctaaatcgtattgctagattagattagcttagacatctaccaccctgaaaactaagtcaacggcttgattttctagatattatatttcttttcatacttagtgctgcatcagttaagtttgatctactaagtagtgcttagaaccataatctctagcctgcttcttgattaccaataagggttttatcggggtttcaaccggtgagttatctggacgttgcatcgactcataaggattataaatacatataagttggatttagccgatgacaacaaaggtttcactgtttaatctaatcttgttgatttcatgacatcggacctccagccgatgtgtgctttaaccttcgaatcaatacttgttctactatatcatattgctagccgattggtttatactggattatattgctatattattacttatcatcatcaaccgattgcctttatatcattatctacattggacatatagccgattgcttaaaccctatcgctatcggctagtatcagcatcggcaattatcggctgtcggctggaactactttatcggcttgtcaatgttaacagttaaatttggtaagcccggagtagtcatcggcttagagtcagcatcggcttcgaagtcctgagattagccgatgagagttgtcaagtcgtcagttgtcggattcttgctatattcggttaaggaaattgatctactaaagaaagcttatctataagagaccgagtttaaagagaatatggcatggcaaattatctattaattaggaatagtttgttagtttccttttatctttaggaaagtgtgtttagtgtcctgtaaggactttatcttttccttttatctttaggaaagtttctttcttgtccgacaaggacttgtatcaacccataggtaaaaatatatacagccagggtttatgtaatctatcctcacgatcaatacaattcggcgcatcgccaccttttaccttttctactttattttatcgtccggcgggacttggcacctgacgcggggctgcatcagtgttcgatctcccgctaaggggtaagtctaatgtttcgccggcccaggcaattgtatcgtttacgtcggcgtcattcaaggccgcatcagtacattcgacctcttggattgctctggtttggatgatatatttgcctacctatttatcatatgtctctgttaatctagtcttagcatatcaatttagctctatcgtctgcttctcgttttagggtttctgccgttatcggctaaattgcgttgctagattagattagcttagacatctatcaccctgcaaactcagtcaacggcttgattgtctagatattatgtttcttttcatacttagtgctgtatcagttaagtttgatctactaagtcgtgcttagaaccataatctctagcctgcttcttgattgccaataaaggtttcatcggggtttcagccggtgagttatctggacgttgcatcgactcataaggattataaatacatataagttggatttagccgatgacaacaaaggtttcactgtttaatctaatcttgtggatttcatgatgtcggacctccagccgatatgtgcgttaaccttcggatcgatgcttatttatcatatcattatttgccgatcggtttatactggattatattgttattttattacatcatcatcagccgattgccattatatcattatctacattggacatatagccgattgcttaaaccctatcgctatcggctggtatcggcatcggctattatcggctatcggctggaactactccatcggcttgttagtcgatcggctattttgatctactatttgcatatcttgtcagttgcaggatcaacctgactggcacgcccgcatctcattaagatttggacctgcacaggagttaagcagatctcccaggccagtgtgttcgattttttcgtcaacagtcagccgatcggctgtttgatctactatttgcatatcttgtcagttgcaggatcaaactgacaggcacgtccgcatctcaccaacctttggacctgcactggagttaagcagatctcccagaccggtgtgttccattttttcgtcaacacatactaccctctttctatgcgcggcacgtgataaaagaaaatggtggttgatagaaagagcaccagagatgacatttcccttaccttacctgtagggatgaaaaatggatcggaaacggatgaaaactagctttatcatattcgtttttatttttttaatctgaatcgaaaacccggatatggaaatgaaatgattattatcgaatacagatacggagcgaatacgaaacggaacgaatacgtcaacggatatttgagagaagagatatcgcatatttcttttagaacaacgtctccaacatttatatcatcaattttgtaggcggtcctacaaaaggatgtgaaaatcgattttcatgactgttcccctcatcccaagacattttactacatgtatagcttacttaccatttcactaaacaacttaacaagttcttgttgtataaattggagatgtctttttttattttatttcacatcttcaaaacttagagtgtttgttttatactttaaacattttcaaatacaaaggttataaactataaagtggtaaattccattaagctctacaactttgatatggaatacgtctccatcagatgtcgtttgaattgtagatctgagattttgtaaaaacatatatggtattttataatgaatatttagacccttaaatgatcttatataataaaatagtcaacaagaaagttgtagatctcactgagctctacattttttataaaagtttgtcttcatccgactccatataaaaaagttatgtatatatacgtgttttctctaaaatttgatccatgtctgtggatattccggatagttaattctgatcattttccgattccgatggatagtaatcttactgtattcatttcgtttctgagaaaaaaaatccaatcgtttctaaatccgagaattttcgaatagttccgaccgaacctatccgaaataaaaaatggtctggacggacggaaactattcataccagttgaacctactattcgtaccagttgaacctactatctccctgtacatatcaatcgccctgaagagagtcctgcatgctcgttattacttcacctgtgaaagagccagatgtccaactcctgcacacctcaactatgggtacgtttttcatttttaaccgtgttaaattgaattaattttaacctatatatttgtacaacgatatctctatcgagttttcatttattataattattttatgattaattgtttgaataacagataaaacatgcgatgtccatgtatactattgccctgattggtaaaacaaagaaataaaaacaatgcataaaattataagaaaataagataatatgagaatggaacaaataaataaataaaaactaaacagatgaaacaaatcgggtagtaacaatatttgtagtgaaccaacgtggcgagccagagtcttattcaccatatcggtgcgtcggctccagctcgattgagctcaatatctcgttgagcccctcgtgccctatggaggatatgggtgcttcgtcaacgctaaggcagtattggttgagccgatgccaacatcgccgagctccatctctgttgccatcaccccatgtttggcgagatctattgagctcgcaagcacatctcgtgctgccacctcagtctacgcaatctagcgttgtcacctcggtctacgcccatctccataatacgcttttttattattggagattgtggttcttaactttgagacggttttttctaagtatcgatctttctaagcactcttggtgtattgtacatgtcctaagcagcttgatcccattgtgttacgacggttggctcattgtcaaggtggtggaagtgtctatgcaactttgtgttgggggaggtgatggctgagatgcgacttccattgctggaagcttttgagctttagctcatcggaggatatagggcaggtgctcgtgtttcgttcattgttttagctttttgttttgaaattaaaaaccgctccttaccgatttctcaaaacataattaaaaccgataaaaaaaactgtagctttttgtcatcgctgcacgaaaactagctaaaactgatcggtttcctcgaaccgaccatcatcggttccacgaaagcggtttattagccgtagttctgtctcatcgggtgggcagcagcattgtttaggtcggagaagcacagatccataatcagccaaactgtaatgatatggcccgataattggacactacgagaaatatgatcttctgtgacgaattccttgtaaagtcggagctattcgtcactagcacattttattttatgacgattagtatgagatgggtggcttagtgacaaaaaaaggtgttcgttgttaataccaactagaaatcgtcataaagtatttcaatgggacatcgcgacgaatattaatttgtcataacgggcacaaagcaaacgtcataaatttatataatgcatttctaaaaaaatatattaaaagttaaaacaatttaatcaagtgaattaatgagaaaactaaaactttccgttaaaaatcatggccggaaatattttttatattctacgtggtctaaataattctctaaaatttttcatgaatttttggtgctcagtaactaattttaataccacaaagtttatttaacttattaaaataaataaaaaacaaattaaaattcctctcatcctttttcagctgtttctctctccctccctcagccagtagcctctctctcccttcttctccctctttgggccgccggcccagcccttttgttcctctctcgccgagatgtctattttgcctccttcctcacaattaaaatagtttttcgggtagtaaatgatttcaaatgaaaaaaattacccataacaaagttgtataacttatcaagatctacaacttttgttttggtcattttgctatatgactttggttcaataatttgaatttgaatttcaaattatgacaacttcaaacaatgttttcaaatactaaatgatttcaactgaaaaattcatcaacaacaaagttgtataactcatcaagatctataacttttattttggttatttttctatataacatttttttgaacagtttcaatttgaatttgaaaatatgacaacctcaaacaacattttcaaatactaaatgatttcaactgaaaagtcattaataacaaagtggtataactcatcaagatctataacttttatttgggtcatttcttcatccgagaaagttatttttaacattgttcacaaaatgtacatatctcttatatagtttataaactacaagagagagatgtaattttttgtgaacaatgttactgtcattttgtcggatgaagaaattatcaaaataaaagttatagatattgatgagttatacaactttgtagttgatgaatttttcagttgaaatcatttagtatttataaatgttgtttgaagttgtcataatttgaaattcaaattcaaattattgaaacaaagtcatatagcaaaatgaccaaaataaaagtgaagaatcaaattatataatatcgacaattgtttacagtgaagaatcaaatattgtatattgctagaaaaatgcccgtgcattgcaacgggtgatgctagttttatacggtttagctaggatgaaattcactttgggaatttgcttggatatttttttaagaaaataatgaactgtaattaggagtccgactttcttctcatgttagcatgcgagtttttttaaagatatttcttatacgacttctttttatatttccaaaagaaaacgaatttaaaatcgactcaaacaaggatatgtatttccaaaaacaaacaaacttaaaaaccgactcaaatacgaatgacgtaccaaaatacaggcaaaaacatctttaatttttataatagtagagatgatgtcaagaaaaagtatggtacaaaattaaatatctacacaaaactgatgtaaaagttttttgaaaacacaaattaatgatctacacaaaatctatcatccatatataatcttagaataaaaaacacaaattaatgatctacacaaaatctatcatccatatataatcttagaaagaagtgccaatttcaagtcggtaaattagaacattaaagttagaagatgagtatgtgttacaatttgctaattatcacattttccgctctcaataagtatagaaaagacatcgtattcaaattgtattaaagactactccctccgtttttaaatatttgacgccattgacttttctaaacatatttggccgtttgttttattcaaaataatttaaataattatgaattcttttcctatcatttgatttattgttaaataaacttttatgtatatgtatagttttacatatttcacaaaagtttttgaataagatgaatggtcaaacatgtactataaagtcaatggtatcagatatttagaaacagagggagtaattagttactccatccgtcccaaaatgtaaaaacctaaaactgaatgagacgttttcgtactataaaatgtttcatctagtaatagattcttatattttgggacggagttactacaagatatatacttcctccattctcgaataaaattaacgtggacactaatctagtttagactttgattgcctggcttttttttctaaagaaaactataaacacttagaaatatgttatagatatgctatattattgatgtctgtaaaagcttcatgaatatgagcatccatttttcatcactcataatataatcatcagaagtaatttatggtcataatcaattataaaaatttttaaataagtgatggggcagcaaaatcaagttgagttaaaaaaaaacattgacaaccatgggccgttggtatggtagggaaacttttcaaccactagggtggataccgggtgaatatctaccccgtttattacatgccacttaaatggttatagaaaaatgttttagaaaaataacaagatagattaatatgaaatataacacttcataaatataccagttcaacttcagtttcgataagtactagttagagtttaatatgttatttttgttataacttgaagtcgaatttgaactgacatattaattttattaattttgttgagtgatacatttcatattaatatatttttaataatcatttagtagtttacatggaaaaccgggtggacgttcatccggtagattgccgtaggtaacatttcggcataatgatcggcgttaactctataagtactactagtcgaagagccgagcagcgtgcccgctgtcacgctgtggcgacgcgcctctgatcatccgacgagagcattcgtcctctgatcggcctctctcgcacattgcttaattagctacaagctacgaggcggcaatggcagcgccacctcacgatcacggcggccgcctccgcgtcctccgaaccgagcacgtcacgccgtcgtcgaccggcgatgacgccgacgcgctctccgaacgtgctctgccgctcaagcccgtcgagcccgtcgagcgactcttcctctaccgcctcgcccccggcgccgccgtccacggcgtcctgtcccacctcgccgactccttgtcccgcgcgctccgcgccttctacccgctcgccggccgcatccgcctcgcgcccgggaagaccgaccggtacgagctgttctaccagcccggcgacgcggtcgccttcaccgtcgccgagcacgacggcgccggcgtcgacgagcttgccacggacgatcccagggaagttgccacgattgcgccgctagtgccggcgctcccgcggggcggcgcggtgctcgccgtgcaggccaccgtgttgttgggcctgcggccggcggcgccgcgcgttctcgccctcggcgtcaccgtgcaccacgccgcctgcgacggcgcgagctcgacgcacttcctccacacctgggcggcttccgcctgcgccgccgccggaaatgtcccgccggagccaccagtcatggaccacagcttcattgttgaccgcaaggacatccacgacttgttcgccgcgcccagggctcagaaagggttcgattcgcccgacgccatggacaggctcgtcgccacgtacgcgctgtcgtcagcgcagctgcagagcatcaaggacgccgtcgccggcgaggcggcacgccgcggcgtcgtcccgccgcctcggtgcacgtccatcgtcgcgacgtacggcgtcatgtggctgtgccacctccgagctacacatggccacaacaacgacggcggccacgacgacggcggcggccgcgcctacttcctcttcgtcaccgaccaccggcggcggatggagggccgcgtcccaagcaggtacttcggcaactgcgtcggcccgtgctacgcctcgatgcccaggaaggcggcggccaccgccaccgtgaccgacggcgtcttcacggcgtgctccgcggtggccgccgccatcgacgaggcggtgcacggcgagaccggatactgggagaggtacccagagcgcatcgtcgaggccagaagggacggcgcgccgttctcggtggctgggtcgccgaggttccgcgtgtacgacgtcgacttcgggttcgggacgccagcgaaggtggagatcgcgtccgtggcgaagaccggcgcgatgtcggtggcggagggccgtggcggctccggcggcatcgaggtgggcattgctctgccgccggagcacatggggaggttcaggacgtacctcgccgacgtcatcgcaggtgtgatctgatcagcgtgcttgtagcaaaatgacatctccagcagcagcccctactttagagccctaaagatcaaatgggggctgccactaattctttaggacactaaaaatatcattaactctagcagtagctctcatattttagcccctatttctttttctcttttattttagtataaattgtatgtttgtgtctactttaacatcacaataatttaaacacaaataattctagcacatgaaattcaaccatattgaaaattacaattttaaacaccatgattcaaatttgaattcaaaatttttaacatgaaaatgacatgtcctacaagaaagtattgaacacaaccgatagttgacagaaaatgcaacgaaacaaactatcgagcaccatgaagcgcccacaaatgttccagaagatcatctcgaagttgctcatgtgcctgtcggtcttcaatttctttatgtatctgtagaaacttctctaaccaaatttattgcgtcgttggtactcctctttcctcaacacctcactatcccctgatcataatcgaagtctacatcttcatctcgctcactgtcaatgaacatgttgtgcattattacacaagctgtcattaattatgtaccatagggtctcggtatcccaaaatttagcaggacccctcaccattgcaaagcgggcttgtaaaacaccaaatgctctttcaacatccttcctcactccttcttgaacttttgtgtaatggattctcttgttaccctgtggattggaaatggtcttcacaaaagtggcccaggaaaggtatatgccattagcaagatagtaacccatagtgtatttcttaccattcaccataaactctagctctggagctgtccctgaagtaagcctttgaaagagtggtgatctctgtacgacattgatatcattaagagaacttggtaatccaaagaaggaatgccaaatccacaaatctttagatgcaacagcttcaagaatcatggttggcccatccacatgccctgagtattgccctttccaacctgttgggcaattcttccaccttcaatgcatacagtcagtgcaacctagcatccctggaaaccctcttggagtgttcatagccatcaaccttgcagtgtcatcagctgttggtgccctcaagtattggtcagcaaacacatccaccacagccttgacaaagtgtttgaaagcttctatcatggtgttttttgaaattctcacaacttcatcaagactatcggctggaatatcatatgcaagcatgcgaactgcaccatacaccttttgcaatgcagtggcaccaagaagacccaccgcgtttggtctttgcctaaagtagtcatcatgtgcctccacactagccactatgcgcaaaaagagctcccttgacatcctcctgaacctccttctaaataattttgcactatatataggaggatctgcaaaataatcagccactatgcgcaaattgccagcaaatctgtccctgtaaattatctcttgacccatgactgaaccacgatgcttccttttggttctcttatgctctatgtcagtaagaagagcagctgcaatatagtagtcatcgtcgtcagacgcttcctcctgctcccaccattgagcaaggagatcatcatcatcgtagaaatccatataaaataatcactaccatcacaatattgtaaattaataagaaaatttaatttccactatctcaaataacaaaatagacaattatattcataataatacacagtacggagtatatatttaagactcaaagcctataaaaagaagtgctacataagaccttgtttatatgggactacttttaagtccctatcacatcggatgtttggacactaattataaatattaaacgtagaccattaataaaacccatccgtaatcttggactaattcgcgagacgaatctattgagcctaattaattcatgattagcctatatgatgctacagtaaacattctctaattatggattaattaggcttgaaaaatttatctcgcaaattagctttcatttatataattagttttataagtagtctatatttaatactctaaattaatgtctaaatacatagactaaagttatgtccctggatccaaacacctagtgatccatagcaacgacagttcagtgcagtgctagtagtatgtacagtcccacgatccaatgcagtgctactagtacaagcacagtgtttgagattcttctctaccaccgaagaagtctactactcctacagttctaaaaaaaatatataaaaacaaatcaatgtctaacacaaaaagtggtcaagtataatacttctctgctagtagtactcctaccacagagattagttcaatccagaaaactctagcggtccgtttggttggagggagtttttaggagggattgggagcttagagggatggggctattatttgttttgtttggtcaggagacaagggaattttggtgggatggggatggggaattgaggaaggaactccctccttttcaatacctgggtaggggtggtaattgagagggaatttctcctttgctttgcctaaacaaatctcagccatccattttcattaatgacctaatctccaactaaactccctgtcaatttccaccacctctgccaaacaagatattgggaataaaaaccaaattcccatcttaatctcaccatcaattccctcgtgtaaactcccaatcccattccctcaaggtgccaaacaagccgtagggggcagagagcggcgagcatagggcggcgtgtaggctggcttggagcggtggccctccggcagtgcgaaggcggtggccctccatccgttgggccaatggggcagcgtgggggtgggcagccaccggttctcctgccggcgagcggatagtggcatgcgggcggacagcggtagggacgatggccgtgcagcaggaggaccatggtagtgcggggtggtgtgtggacagcaacgtgcggaccgacggcgggaggtcgtgcgacactgtgtggacggcggactcgtgagggcggcggccggaggaccttgcggatgatgggcgacagaggtaggggaaattctcacctttttgtgccaatcttgccggaggtgcaggggaatcgatggccgctggtgccggagcccagatgagatccagcatcgtggtgccgtgcgggaatgtgacgagagcgtgaaagtgaattgtcgtttggcgccagaaaaatatcgatggggctatgctcggagcccccaggactaggggcttgggggtggatctgagggccttattattttgggggctaggtttagggtctttactggatctagttttttatgttaaccctcaaaatttatttagggactgggtttaaggtccctgctggagatgctctaaggaccatttttggttcgaagcctgcaaaataaatgtcctaataagttatctgcactctgaatagtattgctaccaaaattcaccgataccacacatagctgggttgccaaaatattttggcattaccaaaatatacttatgctttggtagccaacattttttacatgcatggtacttagcaagcctaaacaatcgtaagtaccaccactggactttattttctctcgtataatctattataataatggaatagctagattaaatcgtcatgtgggctttaagggactactgggtgattaagagatcttattcaccaatctctaccgcccacccacacgcgaaaattggctcgcccgcccgggacaatcggtgttgtagtagtgggatcagctttttgcaggcggccagcccaaccgcctgagggcaaaggcctgcgaaactagtgtatttccgtaggcgggcaaacggccgcgtaaagagcaaatttaaagaccacaaaaaaacccagaaaattcaaacattcctataagagcatattcaaaaacctcctaatccattcacaaattcatcacaatcctcaaatccattcaacaaatttatcacaatctccaaatccattcaacgaactcatcacaatactcaaattcatttaacaaattcattagatatcatcataaagcagaaaattcatcgtcggtcgaagccctgccgcaacctgagagcccccaccctgacctcctgacgccaccgccggtcaaagccgccaccactcactccttccaccggcgtatccaagcgcccgaggacagccgacggcagatccgcgctcccgaggatggccaacggcagatccatgcacccgaggccagcaggaagcgaatcccattgctattgtccaagcaccgtcattgtcatcgtcgcagccagtcgcagccgtcatcttcgccattgctgccgtcgtcgtggccggtggcggatccaagcattgtgccgttgtcgtcattatcggctggaggcaatggtggggggatagggatggaggtggggaaggagtgtgaggtagtgggagtaggtgcagggagagagagagctgagggagaagaggggatggaggagaggagccatgacctaataggatccccatattttacggacggcttgcaaaaatcatatattcggacgtccgttatgaaaataaatgtttttataggcggatctcttaagactccaaacataaaaattgattttgccaggcgaggctaaatctctatttttgtaaacggttataagagagtatttttttctctccacctgagaaaataaaaatatgttggtaaaaattgtttttctagtagtatgtgatttagagaggttatagataaacatgaaaatattaaatatctaaataatacacctcagtagagggagtgtagtaggaatcacaagcaatatcataatggatgacaaataaaagtttttacttcctctgttctagaaactaacaacatagctaatactatatcagacacaatctactgttatgaatctgaacatttttttaaaaaagagacacataaagtagtaataatttcccaacccagtgaggtggtgttttgatccagggacttaactttagtctctatatttagacactaatttagagtattaaatatagactacttataaaactaattacataaatgaaagctaatttgcgagacaaatttttttaagcctaattaatccataattagagaatgtttattgcagcatcacataggctaatcatagattaattaggctcaatagattcgtctcgccaattagtttaaaattatggatgggttttattaatagtctatatttaatatttataattagtatttaaacatttaataaaaaagttttagtcccatctaaacagggcctcagagacccgagaatgaaaaaccattggcacccaaaaccaccagacagccaatttcactaactttgaggtcaaccgtcgtagccactagccaatttcttctgacccacggcaatagcggccagcgaacgcctcaggatcaacaccgccaaacaaaaataacggatggtcacaaccttgatatacatatccaagtgccaaattgccaaatgcacatggggctgcaacgtaccttagcctccgtatcatttatattattgagcttattattttgtacaatttaattactcatctagattatagaaatatattaaatattttaattagttaatacacttaacaaatagttgaaaataagtaggtctaaacaatgcaataattattttaagcaaacatatattttaaaggtcggagcatctgctttaataattatgtaaatcatctgaaaagaacgaagcctagcccataaacgtcaagaaatcatgagaaaaaaaagaagcactatatacttattctactatctcactgaagtttaaattctattaccttctttacgcatacatgggacgtttcgtgctgtggttagagatttaaaccattatcttcacttcaatgtgtggcattccatgttatcacaaaatatcggtgcgggttttccctattttacgtccttttaatggaatacaaagcccaatcatttcatattttcgcttatgtttatgcttataagctaatattaaaatataattttgtactaggagttgattttatggttttctgatcatcgtagtttccaacatttgcttttcaatcgttaaagacacatatatataactcataaattactttctagttgataacaagcggttcggatatgcatagtagtttgtaaatgctactataatttgaggatgttgtatatccataatgatacttatacacatttatatcgagacactgcaatattggccgaaaaaaaataagaaaatgtaatggcttagggaaagcacaattgatgtgatagtgtagttgtgctagtgcagttatgagtacctgactctactcgctaggttcaaatacttgctccgtaaacataattatatgtattaattggtgcaaagtctagaaaatatacttccactaccataggacagggtatcccaatcgatccatctgtgagtgatgaagacttgaggcccgttacaaaggtacttatatttgttgggctacaaaataccccgtcacataggcaccgagaggcagtatataagtcctcagaaccaggcccgtcaccgattacccttatcgaaaatggggtttggtggtggcccatctatctatctatctattatctattctattctattctattatatactaaaagtccattaaactttctacaaacgctcccaagccaccatgtggcactcctacaaacgctcataggctgccacgtggcacagtcaaatctcaccgtcgattttcatttaaattggtagacccattattttataccgttagattagacctgtacatgccgtcgattttcacttaaattggtggaccatttattttagatcaataagttagatatatgtacatgtgtatactacttaaaaagtacacgtaagtacgtattccagaaaatatctttcaaaaactaccgattaagtttgtgcatagtattcctgccaaaaaagaaaaacaaacgtatgtatgtacttatgaactccccggttgcactttttttttctttcttacatttagatttagattagatgaaaagcagactccaaacaccccgtgcacgcacgtaggcccgtatgtaaacttcctccatcctccaagagtcctctctctcaccttcctattgtctagctaatattttaaatttagaaaaaatattataaacaaaaaatttaacccattaatttccatttaattcagtagatccataatattaaaccagtgaaaccattaaatccacatatgagaaaacactcttctaactttaaacatatatatgtaccactgtcttttgccatttgtgtgataaccaaataacaatgatacaataaaaatatactaaaaccacactgaataataatacacatataagttgggtattatgctttaaggtgtaaatatgtactacattcatttcaaaatatagtaacttttaactatgattttgaacaagcattagtcccgattcatagctaaaaataattatattttaggatagagggaatatgttatttctagttgtattttaattagacgcatgtcattgaaaaatccatgaaaaacataaatgggttgaaaaatgtagattatataatagttaaattagacttatattttcgagaataaaaattactccaacaacaaaaaaaatacacatatatacaaatgacacttctaaatttatcataaatgtatttttcaagtattttttgttttctctattcatatattattggacaattaaagaacaaatatattcttttggcaccatattgatgttttttttatcttctacttagccttcgttccatctagctcattggttgagcatgtccagggcacacaaatcgacgtaggtcactagcgcaatatttattaagtattaagtattataaactcgaaaatgaatttatttgatttttaaaaaaaattgtatagaaaatattttgtaaatacgcactatttagcaatttggtaaacatagtcacgataactaagtgagtagccaatcagataagcattttagaacttaaccataaatttgttatttatgtactaaaacacttaacatgtagtatacaatatataatttgtcaatcaagaatatcctaacatatcaaccaaatgtccccactaatttatccctatgtatataggttttatatactatctaccaattgccaagtcatattgcttacatggtatctatgcacagtgcgtctaataattagctgacatccaataaacatgtttgtcatgaagcacggaggttaaattaaggacgatactaaggctgattttcattcgttagagttggctggcacggaaaacgaagcagttcattagagtataattaattaagtattagtaaaaaaacatgaaatatggatcaatatgatttttttaaagcaactttcctatagaatatttttgtaaaaaaaatacatcgtttagctgtttgaaaaatgtgcatgcggaaaatgagggaggagagttaggaactctcagtgccgaactcagcctaagggcaagtatgaacaaatgataggtaaatagagagtgccaccaagccacatcaaataatagttgactacaaatagattgtgagtatgagtaatagcattcttacactcctacaaacactcctaattaagatgttatgtgacgctctaataaataagagaaaatataagaaaaggcaaaacatatagtcatcaatttacacttaaaccgatcagttcatgattttcaaccattagatttggtctattctattcccttgctcctagaaatcagctaatctatccctatgtatgtatgtacacaaaagatatcgaaaagaagaaaaaccgaagagtgcatacgatccatcccatcttggtatagtttttcgtttctttctttatagccctatggtttttcttcaaattgtgcatatatgtagcagccactcctgacgatgttgtcgaagaagcaacaccgctatggtgccgctttacgccatcccaccaattttcttgaaaggttttattttaaaaaaaataatgtaaaggcgatcatagacgctcatataaacatgtacatacccacccatgaatacatatacgcacaccctaccccatatgagagaaaaatatttgttaaaaaaaggaaaaagtaagtgcgtacgattactattcaccagaaaaaatatatatacatacgtacaatcggaaatgtcatacggaaccatattatatcattttttaattatgttgttcccatgtaaatagtgttaacaattagcacaaataatttcaacaatataaattattccttcgtatattaccaacaaacatgcataggtgaattagatgtataataaaagaaaaaaaaatcaaagtctatattatgtttgcgaaggacagtgataggcgagtttacatataattgagacaaagtgatttctgtttgaatatgatagccattttcatttagtatataaattctatggtttatttaacagtataaatattttttcttttacgattatatgttaatgttgggttcttataatgaaatatagtgagacatgacttattttagtattctttttacaaacaataaataaattgcccacgcatctgcgcgggcttcctttctagttaaaagtaattggtgatgggccgcaacaaaaccccatcaccgattagggtcatcagtgacgggcaaatgccatggtccgacaaagatgattgtgaagctcgtcaccattcagagttaatctttgacggagtttggttgcggcccgttatagatagccacacaataaataccccaagactttcgaggaatagttaacccaacaaagtgataagggatgttaggttccgatcttccgataggtattgataaatagtcaatttgggcggagtcgtgacacaactcgatctggcatctgaacaaacatgctactgagccccgcaatcacagcaccacatcttctctggttatcaaccgtgccgaaacccggttgacctcgccgagaaggctaatccctgcatgcgaatcgaagaacacaagcaaaaacaacatagattgtaaccaaattacatatgaatgattaaacacatgaattttggggttctacaaaccgatctagcggcgaaactgttcttaacaaaataatctaagcaaaaaccgactctaaacgatggcggctactgaataaatatgattagggacgtcctagggttggcctagggcgcacaccccttggggctaagcccatgacacaattcaaggcccaaaactcaaatcggattcgcactggatgaggtacgtggcttgttttgcagatttccggcagctcggtaagaattttgacaagggaccaaaaccatctgaaagtagacttcataagctttacaacaagtactaatgggccccaaaattccttctctatcagcggctaagtccatttgaaattgatgctgtgaggaggcccaaatctgaatccaaagagtatggaactttatctcttgtcttctatggacaaaaagtaacatggtgagatgaaagaagacttggagaaggtcttggtttggtccccaatcaacttcttcaatcaaccacgcatttcttacattcggtctcttttctttcgcccaagcaagtaactctgcaaacgaaaacacacaaaactcattgtgtagcaacatttgtgtcagggttatggataccacatacctaatagtagttaactaaatctactcgatgcacattatattctcctttgctatcataattgccaataacatgaaaaatcacataataagggcatggcaattcaaatctagcaaacaatttcttctctaagcagttgagtggacaaaaatcatcaaattgaatatatccccaagtatttaaagaagatagcaatttaagctcttcattctcgctaacaatgtgaataacatgtttaaactcaacacatgatggctctactatagaactaatatattcattcactagttgtggcatggatataagtgaagcatcgcacaactcttctttatcgcaagaaacataagcaaattgttttgtgacaaaggtatttcaacaattgtttccactatgggttgctctaatgtagcacaagtagtggacatagttggcacatcataattatgcataccttgagtagttgtagcaccattatcattacctttttttcttatcttcagaaattataggcacttagtcaattaaacattcctcaagtatgcatgaaactatggataggtctttttgctctccatctttcttctcttcctcctcatcatcttcaacattggaggtgctgatgtagccatcttccgtagcaacgtatgcccgttgactagggcaaaccttctgcatatggccaaatccttggcaatggtggcactgaatgcgtcccgttgaagcgacggatgaggcactcttggcgggtacctgcaaagaacttgtacctaaatctgcaggtcgtggaggaggtggttttggcgctgtagaaactccagacgcaactggttgcttgcacgctggtgggggcgcccagaaagagataggcttgggcagactcgaagatggcgtcgtgcgcggtgtgtacgtgttcgtcttgttcttgacctgttgatcatgcccctgtaattccttctctgcaagcatagcaaactgaaacaactggttgacaatgttaaattccttattatctaatatgtcctgaatctcgcgcctcaatcccatgtaaaagcgacaaatggaatccttggttccttccactatgctacatcgcataaataccttttgtagctcaccatagtaatcctgtacagatttatccccttgttctaaacgcttcagtttcttgcttaaatctctaagataagatggtggaacaaatctatcgcgcatagctaccttaagttctttccaagtagtaggtaaaactccatcgtcagctaacatagcccaccacatgatagcaaaatctttgaactcactactggcttgtcgaactctatgttggtcaggtataaggtgggcactaaacttttgctctactgtcatctcccaattaaggtatttctcagcatcataataaccaaaaaaagatggtattttaaacttaaccttaacataaggatcatcgggcacgcgattattgttaccttgttggtatcgctgattttgagcgccactcatacctgtcattgcaaacacaaaaacagcagcaaacagtaatctgctacacggtgtagtggtgcctctcaataactcagccaaatggagcaccttatcaagctattacaagtgtcttaccagcaatgctaaggacggtacaaccgtggctagttcgtgacacctcgaaggatgtgatgtggcgattgcaaagatcaaagtggtgctgaccagaagtatatatgtagagcttgggaggcacaatatatagtagcaaaggaacgcaattgtgctaatcagaaaatacaaagttcaataatagttcaaagtactagtcaatgtgctggcctagcctagacccaactctagctcaagcaagcacccgacaatactaaggactagatatgaatcaatgcacaactctgcactctcaaaacatactcaaaggatgaatgatttttcttttttttttcttggtgctgccttttttagcacctttctgccttttttttttcttggtgcggctttttcttcctttttctttgcaccttctgccttttcttttattattattttttttttcaacagtaactaaccactgacctcgaacagggactcaaatgtaaatatgaaaattattgggactcagcaaagtacaaaactaaaattggatcacctcaaaaatggattgctcatgtcattttcttttttacaaaaatatctcaaatccgacataaaaaaaaattctccaagatgtaacagaggtccgcctttatgtggggaaaataacgtgaggatgagagggattggccactgtgtgactcggcttggtttcctattggtcccacatgaaaatttagataatttatcctcaaccaacataaaccgatctgctattcccaaccaaaagaaaacctcctctttctcttttctacctgcgcatggtactgcacaccgacatacacaagcacggtaaccggacccctagcaaccgagcaactccaaaaccgcttgacaaaaacatctccaaactacaaaaacggaaacccgacaacgagacgattcaacttttcaaggtcccggcaacaaccgacgagatgaaaaactcgaccaaaactgacgtacaactcacaccgacttgagtgatgaaccctagacctagacctaagtgatgaacagatacaatactcaaatctaaaaattaaatctaaaactaaactagcactcgacacgacgatgcaatctagaattcaacaaagcaaaatctaatagaacaacacaacggctcaaattgtttaggtaaagaataaatatttttgtgtggcaattttctggttattggaagataaattacctaacgggcaaccgcgctctgataccaactgatgaggggatgttaggtcctgatcatccgataggtattgacaaacagtcgatttgggcggagtggcgacacaactcgatctggcttctgaacgaacacgctactgagttccgcaatcgcagcaccacgtctcctctggttatcaaccatgccgaaacctgattgacctcgccaagaaggctaatccctgcatgcgaatcgaagaacacaagcaagaacaagatagattgcaaccaaattgcgtataaatgattaagcacacgaatttgggattctacaaaccgatctagcgacgaaactgttcttaacataataatctaagaaaaacccgactctaaccgatgacggctactgaataaatatgattagggacgtcctagggttagcctaggacgcgcaccccctgggactaaagcccacgacacaattataaggcccaaaacccaaatcagattaggactggatgaggtacatgatttgttttgcagattcctggcagctcagtaagaattttgacatgggaccaaaaccatcggaaagtagacttcataagctttccaacaagtacttatgggccccaaaattccttctagatcagcggctaagtccgtttgaagttgatgctgtcaggaagcccgagtccgaatccaaagcatgcgaaactttatctcttgtcttctatggaccaaaagtgacgtggtgagatgaaagaagacttggaaaaggtcttggttttgtcaccaatcaacttcttcaatcatccacgcattccttacgttcggtctcttttctttcgcccaagcaagtaactctgcaaacgaaaacacacaaaactcattgtgtagcaacgtttttccaaatatataacaagtaaatctaatataaaacatatgcacctttagttgattaatacataaggtactcacggttatatccgagctagttgtgtcctcatcacacagtgtaccgttcgcactttggaagtgagggttagagtggcaaatttttgctctttgtttgaaaaaaaaagtacaagagtctccgtaggtaataataaataaatttagactacacattcgtttgttaaaagaaatacaaaggttcaaatctttaagaaatagagctttttttttaagataatggaataaagcatatcctcgtaaacaaatgtatccttgaacgagtcatggcggtgggtttctctgctgtttgtttaatgacgtttatactgtcctgaatgcggcaactcatttgatagctcgctcttataaacactctagtaacgttgtccttcgatcgtaaccctacagtgtatctaggagacactttataattactagcaaaatacccgtgcttcgctacggtgtattaaaactaaaaatatttgtttttaaccgaagttattttcacactgctttggtacttttgctcgctagaaaaagtcacaaatgatagagagaaatatatagtagctcgtaataaattattattcaatagtgcgttgcaacggaataattttaactaaaatcacaataaatatttttagaatttaatttgtgatatgggtccttttagaatatggtattcttgatataaatctgccaataaacaacatgttgaaaacaatatatttcttgtttaccagatttaacatcaactaaggttttgtagcaattaaaaaaaagactaactttctcttgttgggtaattgtatgttgttgggtaatttttatttttagtttttccctatgaattagataggagatatatttgagagaggcaaagtggacttgttgctttaaaaaaaaagactaaccataccgaatgtggtccaacaattcaatcggacgctgctagtgcttcatgggctgcgcgcggcccaatagtgctgcagcccaaagatggaggccggctcgatgcgggattgatccgagtcgctcattttgatgaacggctcagatcggttccgaattcgtcaaaacggcttgtaccaaaccctaaccctagttttagttttttttctctcccgatccccttaggctaaaatggcgatggcggcggcgatttctggcagagcgacggcgacaaggtgcctgcaccccgcgagcggcggcggcgccctcccccccctccccttcccaacgagcggctgcggctgtgccctctcccccctccccgcgagcggcggcggtggcggcgaccgcgggcggatccggtagcggcggctccctctgccacctctcttctccctccgatggcggcggtggcgttcgcgggtggatccgtcagcggtggtggtgaccgcgggcggatccggcagcagcggctccctccgccgcctctcttctccctccggcggcggtggtggcgtcggtgaccgctgatggtttctctttttcttttttcttttgcagtttttccatcgctattgctaaccaaatcggttgatatgatgtacagatgaaaacacggatgaaaaagagaggtgacaaaaggaaaattacgaatattttaattagttaagattttccataatcaagtgcgcattccaaaaaaaaaatctgtatccttgaactagtaactatgatagacgccttttcactagaaaaagcttgacgagtaaacacggcaaatgaatagaaaagaagtgacaatcagaattgatttttgcaaacggtcaaaagtcgtttttgcaaacgggtgctctacccgtctggccaaagttgtctagctataaaaatcacggttttctcatacgggcgtcacagccacgcgtaaaaaccattttcgcaaacagcttctctaggagggctgcccgcaaaagcagattctcatgatatggtacccgcttgtaaatattttttctgaataaaaaagaaaaaaaaatcttgaaaccctagcccatacatatcaagaacatgcaaaccatcgaatggagcccgacagcccgcaggcagcggatccgccgcttctattgttgttgccggtggatctgttgtccctgagctccttgatgtcgcccgaagcacgccgcacctccaacaccactgcccgaagcccgctgcgcgggggcgaatctagagcacgaaggaccagaatgcacacttcatttacgcatgggctgtagctgttgggcacttggacagtttgggctgcacgtaagaaattgggccttcatgggctgcctgcagcctgctgggcagctgaaggtggtgcacatatttttttctggggagtgcacaaaaggtggagattagatgctaataactaaaaactaaatttttccctggtgcctgtgcacttggcaagctgaacgtggcgtcgcccctggctgcgcctcaactccaatggatctgctgtggccaagacccgctgccaccgtggtgggggatgttgtcgacgatctgtgcgcagtcgctgatggatttgctcgtctcggggtcaccgtcataggatttggccgtccaccggatccagctgtcgcgagttcgccgttgttgctgaagaaaaagccgaggtgtagcacgacatgagattggagaaggagtcgaggcgcagcgcgacgcgagatcagaggagccaaggcatggcgcgatgtggggccggaggcagttgatcccctatagtgacatcgcctgtcggttgctcctatcgcggcgtcaccctgttggcaggctgctcccatttcaacgccgcccctttgtctactcccgtcgcaacgacaaccgtcaagagaagaagagaggggatgagggaggaggcggaggtggagaaggagaagtcgagggacagagggagaaaaggtagaggagacagaaaggagagaagagttaataaaaggagaggaagtggggctgtgaaaggatttttacatggggaccttttaacaggcccgcctctgaaaataatcctattttcacaaacagacatgttaagaggaccacctacaaaaatggattttcataagtgggtctctactaggcaccttcacactctttgtatgagtggtactttgtaataattggctgtagctctgttgagtaaaggccgggatataaattccattatctaaaaaactaggcaccttcacactattttttacatacggacgttcttactctctgcctgcaaaaaaaacaagaggcgtgtcccaaaaatatctctttttttttttgttagtgtgagcacgcatgaaaacgaaactaaaatagaagagaagagtaatgtaaaatgttatcttttgacatggtgcgatctaccaaactgaacatttttttcatggatttccttacaatatataatgtttataatctgccatatagtatacaaaactgctttacaatatgaatctattgacgcaaagtcttcatactctgtatccatatccatattcatattcatatatctgtctcttctctactaataaaatttaatagtatttccatcatcactagaaagtaggttagaaccccgtcttctcctcacctgtatctcgcaaggcttcatgcctctttaccaaatccaaatccgctgcagtgatagtgcaaaaatgctaatttgatggtaaaaatgctacataaaatggtcttgcttgatggcttgtttcatgaacagtcttactaacaattacgtatgattcatctcagattctatgcgacatatttttaaccacaagcaagacgaatgtctggatctatagttctaacttgcatccatagtgctagccaactgcacaaatctgcaggttcttaatctgtcaacaaacagtttgtcagggaaattaccttatctttcaacacttgctcaaaatactatatcaacaaatgctttttatggaccattttacagtatgggttggcaaattgtcagtcctaactgaattaggcctaggagagaataactttgatgaaagttatgttcctgaaaaaaggtgattgcagtagtttatactctttagttgactatctgcacaacataagaaggcaaaggaaatgaaatgagcaaatgagaggtatacaaaaatatagaaaggcaactattggtgtgcaacaaatggaaggacgaatgaagctgcaatgcttttctacctgaagctgtgttcttcctggcttgtattcaagctaatattctgttagcactcacgccgcaatacgtatgaagtatctaacacccaaacatgattgaatgccaccttgttgtacctacaaacttgtctgaataaaacaatcaacaatttatatgggactatttcctgtaagaactggttaggaatgggcaccactatcccagccagagtaaagcatggacaattgtgaagaagaaatttattgtgtagagcactaaagcatttgcgaaagaaatgaattgtgtagtagttcccttttttcaattgtcattccaattttgcccattatttaaagtactacatccgttccttttttattaacatcctagaatatgatatatcagcctttctaaagtttaactattaataatgtttgtaactatagagggtctctttgtgaaacaataaataatagcatagtgaaggacaaaatagttcacctgcaatgcaggtcttgaaaaatttgttgtgattgattgtctgtcctttggacttcttgtacatatcaatatatcttgttaatgtgtacatacatacaaagtacataattggtaacaggtggaatagtttgatctttaagtgtgttctgccaaaaagaaaaaaaaaggactgaaggatctcaatatctgcttttctatcccaatgaacagactacggtttcgctactatgatttaattgtgagtttaagtaaagtataatgtcacatgtttctgtggtcaaactataatccaacctattttattactgttaatatttaactatcaaatagattatgttttcaagtagcaacaaaattctgcttatgttcaaaaatcacatgtattcctagtcaaattatcctccaacctatttttttgatcattgtgaagtatatagctatcaaatatttctaatgtatgggtagtaatgaatttaggtttaaattcacttacaccacaattcaaatgtagttatagtaattatactgcatttacattttagttacaactctatctaaaactttggttatataatgtaattttctatatttttgttgtgaatgtgttctaatggatccatttagcgtgtattgggaaccctgattttgaaatttcttacattttctaaattcaatggcatattagtttttttggaagcaatatgttatgtgaaaatgtattgtttgtctgaattatattcttcagactactataggatggtataaattcaatagactacaattggtgttaacaagcatatttctgatttgtttcagttcaatacaaatatttgtttacccagttaattttgaagtttggatgacccatcaatatgtacaagtttgttgtcttttgtgttatattgcattaatctcgtccattgctttgtttcctacggctgaaaattcagattcattgccacagttatgaaaatggcaaataatcatttcatgatgcataattttttatatatttatattaaatgcacttacagaaaaaatagcattagttacaccgtagttatattgcacttacaacttagttacatgtgtgatttagttatatctaaatatttatatttattatgaatacatgataaggggtgtatttgctatgttctttttgagctctaattttaaatttcttaatctgaatcttaagtcttaaccatagttttgggaactatgatggttgtgcaatgtattgttcctctgaattacaatgttatgaaacctaaaagatggtctagagaatcggttgttaacatgcagatcagttctaaaagtgtttattatttgaaatagtgttctttagtgtttatttatttattcaactcctgatgatgcatttttaatggcactctgcatagtttagtgtttcaggtagcatagtgcattttctttagtttgtggtttagacttctgattttggattgttcatactccctccgtttcacaatgtaagtcattatagcattttccacattcatatttatattaataaatttagctaaatatatatgtctagattcattaacatcaatatgaatgtgggaaatgctagaatgacttacattgtgaaacggagggagtagttgtcattttcaaatgattagagttcggaaactgtatcgatggatgtttttgtgttttaggcttttatttattttgataatttagaacttaatatcatttttttgcagtattcatatatgagaataagagattgatcttaggttacaagaataaagaacatgacaatgttatgaaatttcttgcaattgtaatcgaggtcaaagaatcggttcatgtgaattgatgcagcctctcatttctttgttacatcatatttacaatgtaatttgatacgtaactgatttgtactagcttgtttactttaattgggctggcccagtcaaatttattagttcacatgattaaggtttatgggtgcaatttttgttcgttgtgcgttttaaatcctatccgttcctttgttttaacgtaaggtcgaaaatcatgtgatttgaagcaagaaacgtgtccactgatagatagcaaatcccaactgcaaatcgaggtgaacagtacctcaaatgaaatactgatccctttggtgagatttttaaaaatgaaccaggaagatagcccgcgcgatgtaagggtagtatactaacagaataatatctattggattttaaaagtatgatttcttcatgaatttatccattagcattgcatgataaatttaattatgtcatttataaaattacctactgcagatcacgttcacaaattatggtacctaaggcagctggttcttgaagttccataaaaaaaaagggagaaaacttaagtcgctataaaagacaatacatatataaccgtatataaattaaattacgtctgcctttttttagaattttctttaacttgtaaagagaatatttaggagtattaatcacatatatttgatttgattttaaaatatttttatgttgtttatcaatcataaaagagaaaatctaggcaacgggatcacgtcccgacgggattgtttaatgaccaactgacatcttgcatggttgtacttgactacgtggaaactgatttaacgtgagggtcataaacgatgtatcccgttgctttgacggtataccatggggtagtctctctcatcataaaatccagctactattttttaagttcgtgcatgcatgcctgtcgggcttatgtaatttctggtcgatgcaacggcaagcttgtcacacggaggcataattaaccctaatttggtatttgtccacatacgccaaggtgatgtatttgggccttgcccgtttgatagggtcacgtcatgtaggatttggatgaccgggctagacccgagcacgagagaggagggtgggcctgggatgacacttttgacttttggatggatatgtttcaccgttagtctcattttaaaaaacaaaatatatgtgattaatatatacatgaactatttttttcatatttgtataaaatgattgaatgagatgaatggtcaaatatatataaaaaaagttcacggtgtcaatatattaaaagcggaggaagtaataaaatgtataacgtgcaggtatagggctcacactattttttttatttgacaataaatcatagtccatgtgcaccttaaataattgattgaaatgtcatgatataaaaaaaaagactaatcatcaaacaactcaacttataaaaagttgttcatagacgatcacaaatatattagcccatgtctctgcattcatgtaggcttgcatgaagacacccgtaactgggagattcggctatgatctacccatagaacttttatttaaaatgaataacaaaataatgatttagatcttaaccaccgttgagaaaaacggggagggaggagagacgcatacacacgcgcgtgaggggaggacatgtggcatcttcaaggaaaaatcgcatacacacgcgcgtgagggaggagagacgcatacacatgcgctagatcgaatgaaggatagaaagaaggctaggacatataaggacatcgacattttctttactacttttaaaattctgtagttgtggccgttactccaaccctatcatacatgcggaatatgagttgtcagattgtctaatccaatggctcatatcgcttccgcaacgctctgatcctgcagagcgcagacgcgcaagcgttcccctctctcccgtcttcctctcaaccactgcctcgatcccctccgtatcaaccgccgccgccgccgatatccgtcgtcctagcgtcgccttaatcctccttcctccccatcccccagcgcccgcatccccctccccctgctgacagctgctccacatcggcgcccaaaccctaacctcgccaccagccgatctgccacatacgccgccacaaatcgccattgccaccgattcctccagatcaggcgccgccgccatcatcgccctaccgccgtcgtcgctgtcccgctggccgctgctcgcgcccctccgcccatcctttcccctccccccaccaccggcgaaaccctagaaccacgccagtcaggacggaatcgaatccgatccccatctcgcgagtcgtgagcagagcaggggaggtgaggggcgtcgtcgttccatcgcgtcgcatcgccccattcgacgccgccgagatcgccgtcacccgaatcctgcgacgccgccgaacccttctcgcgtcatcgtccccttccgccgccgccgcgcactgaaccagaggcgaggtcttccccagccaccgccggagcttccccatccgccgcggctggagtcgacgtcgtccccatccgccgccgctggaggcgaggtcttccccatccgtccccagtcgcggccggagccgacgtcgtccccatccgctgccgccggagacgaggtcttccccatccaccgccgccgccacagttcaccgctacccacgaggtcgtccccttccgccgccgtcgcgcactgaaccggaggcgaggtctttcccattcgctgcctcctccgccgcactcatcgcctgtcttcatcgtgcgcatccctgccgtgcgccatgtttagttgtcttcaccctcgacgccccggagccggacgcccactgcccaactccacgccaccggacaacctccatccctgccgtcctcctctccatcgtgtgcaacttcttcgttatctacacgcccgaggagagatgactcctaccgcggaggttgatgcacaccccccgccttctttctgttgtgccagtattctcatcgatgaatgattttacaacacagcagcaaagctgttgccatctgccggcattatcccaggtttgcttttccacatccttctctccttctcaatttctttatgtgccccttgtcagattgcatttagtttctccttctcctttctgctatcaaataggatcaatgaattgttccgtgaatgctgatcatattatgagaattttcccctggctaaaaataaatgaatggaatctgtagcaatatgctatatgttaatcttgaatttgtgataatgtcaacattcaacctactatgaccctatgtcacactgattcattgtcttatccgttgatttccaaatttgcttgatcgatacatgttagaatgcaattccaatagatatgaaaataacaaaattgataaaatgtttgattatgctatgaaaattatataaaatgaaaagctcaatttttatgtaaatcattgattctgggtacttaatcaactacaaaaagcattgccccagatcccaaatttcataatttatcagttggtcatttttgcttttgatccttgcacacgatgacagtacctctgaggtattgtttcacttttacattgaatttacatgacaaatcctaaatgaaattataaatgcagctgtcaatttggtttacctatgtaaatgatgcaagattcaagtgcaggagctgaaaatttctctttcagggaccaagaagaatacaaacttaacagttagttataatcataagattatataatgtgtttcattttgttatcattaaactgatccacatggtgttcaagtgattacacaagtgcatagattgttttaaaagttgggttcgatagatatgtagaattccatgccgccatcgctgaagccgcgcaggcaagcctcaacgtctgcacctaggcctttagcggctgcagctactgtgtgctgtggatggtacccttccattacagtgaggtcttccagatcagctatcacggtggttccttggtgtgcccatgggcagcacaccaactgtttgatgaaatgcatgatcgaggtgcactcctgttactgtttgaatccttattattatctcatatttactctatttttcactgtatgttgtgatttgaagctctgcctatgtaaactaaaattgaattgttccttggtctcgaatacttcatatagtgcaaacaaatatttcatttttgcagggtagaacaccctattattttagtgtatagatttactatgagatacttcactttttaatgactattggagtcacgtcagtatgttaatagtgatatagatatgctaacatgtccaattttacttgatattcccaacacaatagctttgtttcttgactgagatttatttgtctcctctttctactgcagtcaaaagtttgcagataaattcatatttcgtaatcgatcagcaatcctggacagtgtttcaagggacatgtggactcggctgcagtatatctatttgtttaatctttagttgcatataaaatccttttgagatttatttattttaacccacagaaaaaggagatttatttattttaagatatgtccctttattgttcaactgcaactgatttggtagtccatacataacaagatgtaacagatgtgccattaagaattatctgagtccgttctatcaaatgtaaagtaaggtgacttgcccttcccagtattaccttattactgttatttgccttcttttattgataaaaaggtcatgtgaatcatggagtggaatattaaaaagccactgcatatagcattgctttatctggatgagttatcatcaagcatcatcatcatcctgttatttctaatcagcgttgcacatctattttatcaagctcctctgttactttctagctacatgaagtggagttagtaatatattgctctatgaagtgaaagtttctttttgctcaaaaaactactcctataatacaatgcctaaatatgccaattttctaccactactgaatctgaagttcaactgatgtgcttcatttccatgttagcctttatatggttagcccaccagtattaagattaacaaattgcttgttatatttgtgagaactgaaaccgcttcttttgaaatgggctctaattgttgaagtctattttttttcatggtttgagatgaattcttaaatgaccaggaaacaaaatattgatatctttggaattacttgctttgatttttaaatacaatttgtcttgtaactttatttgttttttgttagtgttgaacgattgcaaacaaatggtgcatcacaagttgctggtcaggttcctcaggagtataactttgtcatgtttctgaaattgtatcaggattagctatgaattggtctttgctcttgtgattattgtagagttacacttcaagctcgtggatgccgctggcccatattctgtgattaacaacatgattaaaaaaattacggttacttcgattatgtactgctgcttgaacttcatttactataggtttacaggtacctatttacaggtacctgtggattgagagggtcactgggtcatcttttgaagttggtttggatgacctgaagctatcaggtagattgtggtgttcttttcctcaattatgtagaggggagttctttttctggtattggagttcttatgaaagccactgaaagacaatatttacattttgtaacgtattattacatttctcaatacattttgtaaatttcattatatttcactgaaatacaatccttatatttcgtaacgtgttattacatttctcaatatatttcgtaaattttgagtgtatttacatgttttctatgatgtacggcaggacagtaactggggaggacagtgggacagcggcgggggtgcaggcagttcgtggcggcgcgatggcaatggcggaggccgctcgggcatcgaggatagcggtggattgtgttgggcgagggtagtaggacgacagaggggcggaggcagctcggggtggcgggcagtagcggaggccgcttggggcgccgaggacagcagtagatggcggcaagcaagggcggggtacggaggcagctcagggtgggcaagatggtggcgggaggtggcgaaggctgctcggggcgggcagatggcggcggggtggcggcgtggctgaggcaacaatggggcggcatgtgagcgccgtcgggatggtgcagcactgccggcacatgcctcatcctcgtcgtcggcatccgtgcgtgcgagagagaggtttgagaggggagagagagaggagagagatctgatgggtgggccccatcgattagttgataaaagaattgttgactgaactaccacgtaggaccaaaaccgctctcaaagctatttaagggagttttcatcctgtattgatagttgaaggtgaaagatatcttatttttgagttcaaggggtaattcgtaatcacataataacttaggggcgtaattcgggtatggaccagtgaagtgaagtcactcgcggagatgcaagtattataggagtagaagcaaagctccatcgctctgcagctaaccacgagcaacacaaaccacacctgttctgcggcgagacaatggcgtcgcaaccggccgctcacgccgctggcctccgcgtcctccgcacgacgcgcgtcgcgccggcgccgcccgccggcgagcccgcgctgcccgagcgagccctgcctctcatgttcatggacgcgatgtggctccgcgcccagcccgtcgagcgcgtcttcttctaccgactcggccccggcgacgacgacgacgacggtggtgtcgacgccgtgctgtcccggatggaggagtcgctgccccgggctatccacgccttctacccgctcgccagccgcatccgccccacgcccagcgagaccaaccggtacgagctcctctaccagctcggcgacggcgtggcgttcaccgtcgccgagcacgacggcgtcggcgtcgacgagctcgccacggacgagccgagggagctcgccaagatcgcgccgctcgtcccggagcttcccgagggcggcgcggtgctcgcgctgcaggtgaccgtgctgccgcccaagcgccgcggcctcgctctcggcgtcatcgtccaccactccgcctgcgacggggtgggctcgacgcacttcctccacacctgggccgcagcctgcgccggcgaccggaagctcccggagctgcccgtaatcgaccgcacgctcatccgcgacgtaccggacaggcatgacgagttcgccgcacccatgaggagctcgccgacgccgcgggcggcgtcttcacggcctgcgccgcggtggccgtcgccattgacgaggcggtgcgcggcgagcccgcgtactgggaagggtggacggagcgcgtcatggaggcgtgcagggacgacgcgccgttctcggtggccgggtcgacgaggttccgcgtgtacgacgtcgacttcgggttcgggaggccggcgaaggtggagatcgtgtccgtggcgaagaccggcgcggtgtcggcggcggaggaccggtccggcgccggcggcatcgaggtgggcatagctctgccgccggagagcatggacacgttccggaggtgcctcgccgacgccactgcttggctttcctcgtcttcccaatgcaactagcgtgggaactgccgtacgtactcctcggagatttcttcagagattcggttttcaagtctatttgctggcttatactctctctgtgcaaaaaataaaaaatcaaaaatcaaaaccagcgatgaatgacataggccttgtttagttccaaagtttttttctaaactttcaacttttcccatcacatcaatctgttctacacacacaaactttcaattacatcgttctaattttcaaccaaacttccaatttcggcgcgaactaaacacagccatatgtgtgttcagattcatctttagggtttgattccttttagaaatttataatttaattttggtgattgtatttttatctctactacttttaaactgctagtaataattatttacctataaatttttttgttgccttgttaaattttttttatagcttattttgctgctcgaaccatcagacaattttgaatggcatttcattatggagtggattttaaactctcgagggggacgtcttttcagtttgcatgacacttaaaatagttacaaaaatattgtaaaaaataagaagttgtattaacatgtgatatatcactttagaaagttaaaattcaacttttataagttgcaataagaaaaaaataaattacagatagttaaagtatatttagagtcaaatttgttttgtttttgcaacatataaaagtgagaaatttaacttgtatgttatgtttgtagagtgatctaacgcatattaatctatcttatttttttccaatttttttcatggtcatttgactgacatataaaccatgagtaaatgtcacctggagagtttataatggtttcgccatttcatttgccctaggatgtgttcttcactcaaggttcccaacctctattctctaattgcccacacgcacgtatcctgaactactaaacaaacagtgtcttttttaaaaaataaaaacattagaaaaagttgttgtaaaaaatcatatcaatttatttttcaaactcttgctaatacttaattaatcatgtgttatttcgtcattccgttttgcgtgcgaaggggagaggtttccaaaccaatccaaatggacacatcctgagggcatgtttggattaatgctctaccaaatttttggtagtgccaaatcttgggcaagtttcggtactactaaaattttggtaggatagagttgaaaatgtttatttggattgaagccaaaaatatacctataagagacaaatttatgggcaaaaccaaatttgtagcatacgtagtattttaatagaggtgtttggtttgttaccctaccaaaattttaggtagcaatccaaacagattctaaatataaagaaatgctcgctactgcggcttggaacaaggtcactttgtttctgacttaagatcggcttgaacccgtagtggcgtcgtgtagtgagagtttcgtgttgggattttactccagcatagctcaagctactcccttccttcgtttcaaaatatggtaaatctagaattggattagatatatcctactatttattatactaagatatattccatcggtcaattctagcttgtaatatttaaagacaggtgtagaacatgttaagcttggtagtatgaaagaccggtatatttatttatgcttatgcttcttagtcaataataagtcctttaaatacttgtaaactattgtattcgtatttactactacatttgttttaaaatatataacttttacttacgaatctggttttaaatctttatattttttatagaaggaataatgtttatgactagtaaatgataaatcggcaaattgtatatgtcagaactctaaaattcgtaaaggtaacatgaataagccaaagctcttaatgagtttattaacaagcttgagttaagccgagccgagcagcttgttacgataccgagcttagctactacaagccttaacagttcctcctcccatattctaaaataacttcgtgtattcgatataggagggtaattcggaagaccataatagtttagagggtattatatactttttccttttaataatcactgtatcaaaatttataaaatcataagataaatatattagaaataatagataaaaagagaaataattgtatgaggaattgataaagtatggcaatgttattttttttattttgtgttgatatgtatgagataagtgaaaaatgttctataataagtttgttttttaagatccattcatttatttaaaataagtttatttcttgggtaacgtaattattacaccggagtttataaatgtagggaataattatattaggaggattcactactagaaaaatgagtttttccaggcggtcagaacgtgttttcacaggcggctcagctccccgccatcgattaaagaccagcgaaaatcaacatctttacaggcggaccttcaccgcttgtgaaaatcgattttcacaagcggctaggttaagccaaccgccagcgaataattaaggagagggcgtgtggccgcaagggagaggagggtattttaaggaattttttaggcaggcggtgctcttaacctgccgcttgtgaaatttaatcttcacagtggatatgtcaagtagttcgcatgtgaaaatctgaatatttttgctgacggctcttttatccttggaccgtaactccctaccccttgttacattttcattgacagtggttctgtatggccacttaagaaaaaaataggttgacgctatgaaaaattaattttgtagcaatgagataaaataaaaaatagttacattgtgatttgataaagtatgatattttagttttttttattttatattggtatgcatgagacgtgtgaaaaataaatttatttcggacggaagtagcagttgatagccattgtcgggcattttcgaatccgggacattttacataggaaagcgatcgaacacagtaaacagagtttacaggtcccaagaaatgcctagtcgacacgtttgcgtgacagatttttgcttgttggaacagagaagtaccggttcatactccctccgtccgaaaacaagcttacccataagttttcgtgcacagtttcaatcgttcgtcttatttaaaaaaatttaaaaaataaaaaacatgagtcacgtataaactactgtccatattttagaatctaataacataaaaaatactaattataaaaaagtttaaataagacggacgatcaaagttggacacagaaacttatggctgcgcttattttaggacggagggagtactaaatttttttgactgtgggactgtttagatcccacccctaaaattttttaccctttcacattaaacgtttgaacacctgcaagaaatattaaatatgggctaaaaatgactaattgcacaaattgctactaatttgcgaaacaaatattttaaacctaattgctccatgatttgataatatggtgctacagtaaacatttgcttatgacggattaattaggcttaataaattcgtcttgtgatttactgacggattctgtgattaaattttttatagtgtctaaataccccatacgacaccctatataatacatgatgtaacacgccaaaactttattcattgtatctaaacaccccctgtgtttctttttatttcgccggtaaggagcgaccccaccggacaggcccaagcttgtgattcaggcgagcgtcagaatcaggcagcgagctgtatggacagtgtgagccgtcacggtacgtgtaatgaatgaaaaagcgaaggtaggagaagtggggctttcatgtttcgggttcatattcttcatcgtaccggtggttatattataggtactgacgagtgaaatagagaagatatgactcataaatctaatgtgtgaaacaatttgagaataggacccacgtaccactaattataatgctttgatgaccggggccgcggggaactgatttggatcggtaaccagttggctccccaccgaaggaaaataaataacgaaaacggctactcttgtgtcaccactgtgctctgtcctcatcaataggtcggtccacctgagcaagctacttttagtgtctcgaaaatatatgagcacatgtaaacaaagttttttctctaattggatgatggtttgtctattttataatatacagataatactattattttcttggagcatgacttacaataagcaaagaatttgaaattgattttatctgtgtttgaaaaattatctgacctgaaaattaatttttacaaaagtgagttattttgttttggacagacaaaagagtgttatgatcaatattcgagtatctttggttgtttgtaagttagggtcttttcctattaaatatcttggtattccaatgtattttaggaagctgtgtaataaagattagaaggttattgaacaaataatagagagaaaacttagtagttggaaaggtaaacatatgtctgttggaggtagattggtttttgataattctgtcctttcaagttttctatgttcatgatatcttggtttgagatacggaaataggttcttcaaacgatttcttttggcaaggagatgaccataacaaaaaaaatatagattaactagatgtgatataatttgtcaacccaaagactagggaggtttgggttttcataatttacagattcaaaataaatgtcttttgagtaagtagttatataagttaattaatgagaatggtgtttggcaagacgtattgaagaggaagtatctttataataagtctataacccaagttgataagaaagaaggtgattctcatttctggtcagggcttatgaaagtcaaaaacacatttttaagtatggcttcttagattgtgaatgatgaagaacatataagattttgggagaataaatggctaggaaacttggcctttagagataaatatccatctttatatgttgaaggaaaagtgcttctattgctagtattatgggctccgttctgcttaatgtttcttttaggagggctttagttggacagagtctaacactttggcatgaattgtgtgcttctattgctcatatatacagttggatgattcttctaattgttttagatggaactatcatcagaatggtcagttttcggttatatcaatatacttagctttaattaataacggttacattgacagaaataaattcatttggaagcttaagatgtcgcttaagattaagatctttatgtggtacttacttaagggagtcgtgttaaccaaggataatctaacaaaatggaattggaatgggtgtttaagatgtttttttattgaaaatgagactattcaacatttgtttatggattgtcattatgtaaagttgatttggagagcagttcaattttcttttggattataccttcatataagcatatctgatatttttgatggttggcttcagggggtggacaaggaaaagagtaaattgatacttgttggtgccctggccttatgttgggctctgtcattgtgtagaaatgatagggtttttgataaatcaccatatgtttcctatatgcaggtaattttcagagtaacatattggcttcggctgtgggctcaactacaaaagtgtgaagatgatggagaaatcctaagtgttgtatcataagcttgtgatgtgaccatggctactacggatacaaccgttgctcacattagggatgaacaacaagatatcaagttcaagtcctccaagtgctagaatccgattcggccccctgctacactactgacttcaaacggccgccgaatctgcatacgacctccgttttcggcccgtgaatatttgatggaaagctctcggagtcctcttttcaaaggatctacctcattgccaaattccttctctgtcatgcgcaattgaaggaagaatgtgttacgtctcctgtaatgggcctatgggcttgtaacttcgtctgggaccctggccctagtggggcccatgtggggtgcgccccaagcaggtggaggacgacctaaggtcctcccatatccataaatagcttggtactccttcagggtttcttaggttttattagattaaagtttagtcattgctacttgcttgcagcgcgcgtgtcggctagaccgtccgtctgctgttcttcggaaccccaacttatcatttgtattcaattcctatttggaatattagattgcttttatcttgttctttcttatttcttcgatttgcttgcaggaataaggttgatctacactggcaagatctacaacacacggagaggtgtatcgataactaaggcgcaacgcaacgtcttgtacagttatagtcggatcgtcaacgtttctcccaaatcatagttagcatcaacgcaccgaaagatcgggccaaacaacagccttgagtgtcgagaggaactcagggttcatcaagtggtatcagagctttcattgctcggcgagtttttatctacccataaccagaaaattgcaatacaaaaagaaattgtatcctgtacctagccatctttgtgccattgcattgttctatcagtatttgctttgttgagttttgcgttgcaacgtcgagtagtgttggtcatcttagcgtttagtccgtttagagtttcgagttctggtcacgtttagtaccactgtcgtcgcatgcttgtatggatgaaaacggtcggaaatggtcggaaatggtatcattattttattatttttttcaaatcgaacggaaacggtcggaaaatttccatatttatgaattcatctatttagtgtcaacttcaatgccacactgacagaaattgaaaaaactaaattttgaaaacggtaaccatcggtaaaaatattataattatattagttttgcagaaacggtatcggtacgatggggaaatttccatactgttttcacccctacatgcttgttgtcatcgggacctacaaaaacagaatcgtcttgtcgttagggttccatttttttagttttcagaagtttttgtcggttagttttggagtggtattagggtttctgtcgtgtggtttatcggtttgtgccttgacccgtggtttgttcgagctgttgagcgtgaggagagaaagatggaagcagaatagattcgattggattcggttgggtggaaggaaaggaaaaaaaaaggaaaataataaaagtagattggattggcaaatcaatttctattttatcttgtgcattgaatccggtcggctgatccatccacccaccgtacccgcacatccccaccatctatggttatgggtgcctgccacgcccagaaattcacgaaccagaatttctaagctgaatgtgaattaaacccctgtacaggaccagccaaggtacacaaacaataattgttgacatacagatccacgtcttgactcctgaagacttgactcttgcagcgaggacactccattcgacaggcatcctttacggcagcgatgaaaccaacttcttcgagacatctccaactgagaagaactttaactctggtgtggggaagagagagcaagactgagtactacccattgtactcagcaagtcataccaggagggaaggtatgatgcaggatatatccaaaggaggctaaaggttcatttacataaagctggcatttaaaagcagtagttgaaagcagtaaaacagttgtagtaattaatcaatattaaccaatcactgctcaacgctacaccacgttgagacaggcccaaaccaccacttgaactaaccagttccattagctaactaggggtgagactaatcacggtgaatctagtcgactgcccataaccgcgagcacggctattcgaatagttttactctaatcagaggtgtacaactgtacccacaagacacagccccatgacccgtttctgtgcaccgacatgccacgacgacataccggaaagaggccgtgacaggaccctttgcataaccccctctaaccaatcgcaccacacctcaggtttcacccccactcctcgcaaggcagcgagcagtcccctcttgtgccacggtgaatccggaagccgatcaaacaaacaccctggccgacccaactctatcacacccaccctagcctggatacgtcagctagaggaaagctacagtacaagcccagtcgttgctcacgctggcttgtggtaagtacgataagttcttccagggcatctcgtgaacctgtccttaatcgccatgcgcacgactagcaaaaccatgcactccatgtagtgtattttacttaactaacaccattgcggtggcactaatccaaagctatgccaataatcaaagtctatgcattaatgtgatccccctttgtgtactagttgaactaagcatgtgttgacatttgagatcacgactacggtatttggatggtatggggatcattggtactagggtatatgcgagattaaggtaaaagagatggagacagggatttttatacaggttcaggccccttatctgacaggtaatagccctacatcctgtttatatgggattaatatagaaaccaccaagtacaataattggaataacctatctaactgtcgttgacttggcggctagataaccaactcatagtcgacgacatggtagtcttcctcctcgagtatgaactcatcgagatcagagatagcactagatccctcttgccagtcttcgtagacacagatggggtatgtctagactaatctctaatgtcgatatttggtggcatgtgttggcttgtatcggctttgtggcttgtattggtttctcctctcctcttagggggcttgtatttatacccatacatgaccccttgtccaagtagaactagggagaccaatatggatacagtccgcgtagtccatgtcgtttccatatagaactctatttgtcattccttatccggaactccttctatatacgaggtatgtttccgtataacacttggtatatggtggaccccgtcgagcttagtcaactactattaggtatgtggtatccataaccctgacagtagcccccgacttcaatgcaaatgaacgagttgatgttctcgacagaagacttttgaaaaacagttgtcgtactcacttgaccgttcttggtgtaattagagatagtgctagattcattttatcggcctttataggcactatattaggtttgtctaggttaatctccgatgtcgaccgagaagatacggagcatgcgactaattctcccgtcttgctgtaatcgagaatttggattgaagtcaagaaattccatcttggcgggtacaccatcgcttcattccatattccttgtcgtgccccatcaaccgttctcgagtaattgagtaggcatagagtctgcgacaaagccttgaaatctgacttgattgttctgatgtctgattttcctgaaatcaatacctagaacatttgccgtactcgcttagtcgatcccggtgtagaaccgtagagacacggagccctcgacaacgctgaatggaactttcctgaaattaattctcagaacagaatattaaatagaaatagcccccgagcgaacgctcaaaggtatcatgatataatatgtatggaaaaatttaaaaataaattgaatctacgtgtgacaataaaaaagtacgctcgctagagtttccctcagcaaacggagttcagtactcctcctagtccccagccttgtcctcggagaagcccattcttggaggagaaggctcaacgacccgtaacttgcctagctgaaaatgcgattacctagcccctagccgtgaagatggaaaaatcaatttccgattacacggcttagttaatgcaccttttgagcactcttacatgatcatgtcttacatggtcgttcggctctcagagtctaacaagacattatccgctctaggcatccccagccgaaattcccgtaggtctctcggaggcttatcggaacggtgtaaatggtcaataggttcgatttcgagagtaggtgttatcgtgataagggatctctagacaaatattgcacatacaagcacttatagaaattgatgtagatgatgagacgaccaccacactaggcaaagaccaggtgtatagttgtgcccaacaaatcgcatagatagtgggagaatcgctacatcgccggcagaagaccagttgtagtcataactcgaccacttgaagtggaggtatgagagatcactacggcctattggttcgagaaccaggagtaggagtctctcaaccgtttgaaattaaggtgccaggactgctacgctactagtcgaggaccagtcgtagtcataactcgacctttggaagtcgtggtacgaggaccgcttgctcctggtggaaaaccggtcgtagtcgtacctcgaccattagaagtcatggtacgaagaacgctacgttgccagtcgaagaccagttatagtcataactcgaccacttgaagtggaggtatgagatatggtatgagagatcactacggcctactggttcgagaaccaggagtaggagtctctcaaccgtttgaaattaaggtgcgaggactgctactctactggtcgaggattagtcgtagtcataactcgacctttggaagtcgtggtacgaggaccgctacgctgctggtggaaaaccagtcgtagtcgtacctcgaccattagaagtcgtagtacgaggatcgatacgttgtcagtcaaagaccagttgtagtcgtacctcgaccagtggaagttgtggtgcgaggatcgctacgttgccgatcaaagaccagtcgtagtcatatctcgaccataggaagtcatggtacgaggatcgctacgttgctgatgggataccagtcgtagtcatatctggaccattagaaattgtggtacgaggatcactacgttgccagtcgaagaccagtcatagtcgtatctcgaccattagaagttgtggtacgaggatcgctacgttgttggtaaaagaccagtcatagtcgtacctcgaccatttgtagggaatccacagtaataaatggacgacactctcgtgacctgcgagaactgcctcctaatgacgacgaagacaatgaggaattatcgtagtcggaggttcagctcctggacctactacctcatcctcgggccctctagaagtctggggatatcgagtttcgtcgtcgtcatgtgatgtcgttaaccttgtccgttgtcgtactgatgtcattagtactggacgtcgtcgtcttggtgacaacggcgatatagtcggccttggttgtcgctatcacgatcatgttgattgccgcattagatgtcgagagattgctcaaccgactggtcgaggaccaggagtaggcgtatctcgttcacctgaagatgaattttaggtggtgagagatcgctacgacctactggccaaggactaggtgtaggcgtatctcgatcacctgaagaggcgctagagttggtgattacatgtgcatctcatgtggctagcatgactcacatacccaacatatagcacatctggatgtttactcgcaatcatgtcgggtgatcaagccaacaacgttcgcgaggaattatccgttaacaacattttctcaaatagtccagctgtagctggcgctatacatgagataagtcgtcagtcttcgttggtaggttgggtgtgacaactcagcattctttgagaacgttctcgataatgcggtgtactcgaccacatcctactcgagtgctcaatcgttcctgaaaaatattttctagatgacaagatatatagtagagaatatcgagtatgtactcaaaaaactacatgaatcttctagtattattaggatataatgagcagattaaatatgaggtattatgtaaaccgtaaacaagcatgatttatacagaagaaaataaagcgagccccagtattaaaccgttgttggcctaatatagggaatgctcacatatagatatcgtttaaaaaacatgttctaggtaaacataataaattataaatatgataatattgtatgatctgaaaattgttacagtaaattgtatataaaatattgcgtacctttatagatacataccggatgtatctacgaaattactagattaattcaaaaatcaacctaccaattaccagtgttcacacttgccttgtatacgttccctggtttgcttttttgcttctagcgatgaatccaacaaataatagtaattaaactctcctgatttgtccttgtgttgtcctcggaaacagagaaagtgcacatgccatacatggcatgcactgcaatgcggctttttcaccggctcctgcatgcaatgacagacaccgaataggattggactagtagctccggttctgactcctacacgaggcggcgatttttgccgactagtctcaagttgccgaggacgacgagggcgaggacgttcgaggacagtagttcgtcggattttcggtggtgggtgtcggttcaaaggtagtcgatccggagcaaggcctcacggtagaccacattgtactgatatcctccacggtgatgacgtcttgaaacttggtcgatcttgatagtcaaattgttgacgacgatgattccgatctcgtcgggagacatactccggtcggattagatcttcccacagctggagtcgtcgagtagcttgtcgttagagaatccatctcttaaacccatctcgtcgaaatcttgaagcaccaaaatcccctacctgtcgcgccattgtcgacatttgagatcatgactacggtatttggatggtatggggatcgttggtaccagggtatatgcgagattgaggtaaaagagatggagacagggatttttatacaggttcgagccccttatctgacaggtaatagccctacatcctgtttatataggattgatatagataccaccgagtacaataattgggataacctatctaactgtcgtcgacttggcggctagataaccaacttgtagtcgatgacatggtagtcttcctcctcgagtatgaactcgtcgagatcagagatagcgctagatccctcttgccgatcttcgtagacacctgatggggtatgtctagactaatctctaatgtcgatatttggtggtgtgtgttggcttgtatcggctttgcggcttgtattggtctctctcctctcctcctaggaggcttgtatttatacccatacatgatcccttgtccaagtagaactagggagacaaatatgaatacagtctgcgtagtccatgtcatttccatatagaactctatttgtcattccttatctggaactccttctatatacaaggtatgtttccgtacaagacttggtatatggtgggccccgtcgagcttagtcaactactattaggtatgtggtatccataaccctgacagcatggctaagcaattcctaatccaacatctatacattttaatacccaagttatcaatggcataaggtaaacaatatatggctgactaataggacccataccacatgacattgtaaaataatgcaacatttaatagaaatgcgggacatttgtaaattgggtgtaatatgatcaattgtaatgcatgacttgccttgctctcgcactgatgggacctcagcaacgtcttcgagaaaccgcggattgacgaaacagccgaaatctaagcgacaagcaaagcacacaagcaaaacatgctataagtctactgaaacaggaaacaaaaccatttttaatggattctatgcatttttatgaatttactgagagttgaatggacttaaacggaactcggatcaattagttatgaattttagaagattatctgtgttttttactataaaagaaaatgccttaattatttattgcgcaatatgttccagggctgacatcatcaagtaggggaagcagcgccgacaagcaggccccatggatcagcgacacaaggggaggggagaggtgccggcaagcgggccccaaccggcagcggctcaaggggcccggtccaacgtggaccgggaccacgcgggtggtccacctccggtccacaggaccgacggcccaaatcggcctccccgccaatcggacggcgcggggagcagccgtcgggcttggccgatcacagcctgaattttcgttttaggatttataaattatttaataaattattaatagaatttatattaaatgttcattaatttacaagtgaagttaaatgtgggaaataaaatttcctaaatataaagcatggatgaatttaatttttattaaattctctgtgattaagtatactctctgaaattttctcggatttttcagagctcaattcttaaatgatacaaagaatatttcagtaattagttaatcaatgaattaatcaattaatgatctaattataattatgttaaatgttttgcttgcttaaaaatccttaagttataaattgttgtttaaaaggaattattagaaataatcttaaaaacctaaaaaagaagattttttttaatttgttaaatctcaatataaaagtgggctagataaaattttgttaaatacttctcttgtttctatagttcctagatttttctgggatttatttgagccaaggaagtatttttaataaatggaattgcatttcatgaataatttaaattgaaaaagtttttaaaattcttctttttggctttgggccgaaagtcggcccaaaacctttctctctctccccagcccaagtcagcccgctgccgcgcgcgccctcgccactgacaggtggggcccacctgtcagactcgtcgtcttcctcgcgccgttgcccggccgaaccctagccgagccgggccgccgccgcccttccaaattcgttcatccctttctcgatccggtgaaattgatagagggaaaatgatccccgagattcactctaccttttctctttttgaatcgtcggctaaaatcgtttggaaatccgtggattcgacctcgaatcggattcgtctctctccctgaaccctaatctttccttctcgtcgccgatcgccatgggccttcgtcgccgccgcttagcccctataaaaggacccccggtgcctcctctctccgccaccaccttcgccttagcccgccgtcgcttgtagcgccgcctccgcgtcaagctgtgcgccgccgtcgccatcgcgagtttagtcgagcaccgccgtcgctccagtcgtcgtcgttgctcgggaaagccgttgtcgtgattgtcaagtcatcgccgacctcgtccgcccctccttcgttactgtagatcaccggagccccgccgtcgtcgtcaagccgaaggtcgctgccgcttcttcctcgtcgccgtcgccgtccggttgccgtctaccgccgttcgtgcctcggtaaggttcgcctcgatgcccgcatcatgttggtgccctctgtttgcgccgccgcgccatcgttctccggcgagcatgcaccgtccgagccgtcgccggtgatgacgtcaccgctgacgtcatcgacgccgtccgccgtagatcggtcgtagaccgtttagatcttggccgtccgatttggatagatcgattccggccgttcatttccgtgaaccgccgccgtgcacccggtccaccttgaacccgacccgctgacgcaataatcccctttttccttttcaaaaataattcattattgcgtcataattcaattaaaatccatataaatgctttaatccggtttaatctttaagaattcataactaattcattgtaactcggtttaatgtggttcaagttgcaaaagttgtataaaataaagatctacatattaaaattatccataaattgaactaaatttatttaatcctttttaaataggctttaattagatttaatcttgtaaaattcgtaataaattcatatgaagtcagattgaggccgttcaagtctcataattcatctaaaattatgatctacatgtttgtttactttatatgtattgtttatttggtttttattagtctttttccttgttttgcgtgttagcttgtcgtttccgtcgtttcgaaggttcgcgagtgcgccggaagtgttcgagaagattatttgaagaccagttattgcaaggcaagtcacacagatcctaaacacaattcctttgagcatgttgatcctatatttaaattctctatttatttcaactgtgcatttattttcgaatgtcaccgggtggtgtgaacttattccgttgttaaggccagtttgcattgattactgtattccttgataccttggattattataatttgactagttgagctttatatattggttcagctagatgttagacataattgtttagccatgcttagaaacattagcacacaattgggataactaatgcttcactattatttaatgatggtttaatgatagctcacgatggtcaatcgtgattggttgattaattaatgtgccaactaaaacttgataatggtgggttgtgagcacatggttttgatggtagtgctcatgacaattaaggaccggttcacgattttcggttgtgaaacatttaccgtgccaaccacaagccagaatgggcaacggctggacactttgtataacaaggctccctgcggagcactagactgagaagtggtggagataagcccacgggggtcgctggggagtccatgccttgtttataagggggtgactatgatccgggaatagtgcactgctttggattgagttatgcgaggggtcttgtcataatcactcgtcatggtgacgtgtctgcgcggacacggtgacatgacggtgggttgtgtcttgtgagtacagtggtacacctctggccagagtgaaactattcgaatagccgtgcccgcggttatgggcgggtcgaacaatgtctttcgtgattagtcccacactactcattaaaaataatgtggtaattgatggtaattaatttagctcctagtttggaatggtacattcctggtttggagatagatctgtgcagccgggtatggttgttcaggatggttgggcctgtgcagcatgggtgtgctgttcagtgttgattaatattgatgattaattactctactgttttacaattctcaaatgtttgctaaatgctgcttttgcaaatgagccctatattatgccatcctttggtattcttgtgcacttgcatatttgctgtgtggcttgctgagtatgtcatatgctcaccttgcaataatcaatcaaacctcagttgaaggcaagttgcgaaggagaagacgtttggcttatacttcagttgagctgcctgtgggagtggagccagagcttcgctagattttattttccgctactaagtgcctcttaagtaagtatttatcgttttagttaatttgatgaatttgtatattaaattgtcagtttgtgtacctcggctgattcctggacgaggattttatgcacaaataagttcggaaattacttgtgaatttctgggcgtgacactcggcttcaaagaaggccggccaagcatggcgacgcggcggcggtgcacggtcgccggcgatggcaactggcgacacaggaggcggcgacggacggcgcggaaggcgacggcgcgcgcgcagtggacggcagtgaacacgggagagagagaaagagggaggagagggagttctcatcgtggggttggccggcgcggaaaggggcgacgacgaatgacggcggcaagtggcggacggcgagacgagcgggtggacgatgcagccctcgacctcgcaaggccaacggcggcaatggagtggcacgacggtggagcaaaccgcggctagcggcggatggaggaagtagtgggtggcggtgcgtggtgagagcgatgtggcggcggcgcacggcaagcgagcagtggccaaggtgcatgttggctcggtgagcgcgacggcggtgattgcgcggcgcggcggcggctatagaggtggtagcacgcggccggaggcggcggtgcgcggcggtgggcggcggcgctagcggtgcacggcgcggcggtggtagagagtgtaggagagcgcggcaaaaatgggaaaagggagaggaggacgcttggttgcattttatatgcgcggggagggcggacatggccgggaactgcctggatttagaggggaaatgccgccggcgacgtggggtggagagagagagagagacgggggagattcaaattgaatcccgcccttgcgggcgcgcgcgcgtgggcgggaatggggtagcagttgcgggagatgggcgagtggtgcggcgaggtgggggacgaggctgggagcgcgcgggagaggcgggcagcagttgaggaggccgctccttcggcggctagaggtaggggaagggccgacaggtgggccccacctatcagcgcctcagagagagagggaggctgggtggacttcgggaggggaagggagaagttggccggcagcgcaggaagaaatgggatggcggcccaagagggggaaaaagggggaaaaagaaagaaaaaggaaaaaaaggaatttctagggattaaatattgcactttgtagcttttaattagttaaaattacttctaaggctctgaaaattccactaaaaatcctgttagcatattttgacatgtagaacccatgaaaaattccacataccatttccgattattctttgtatttattaattaaggaattagctctaggttaatacaacaatttcttcggatgatttattttatgaatttaaagcaaggtagggaacttcaaggtgtgacagtgcctctcgtgttcttattaaaaatgctttttttattggaaacatctttgtaggcataataaaataccataaccttggaaagacctgaaacgatatatgagagatgtttatgttcacatgtattgtgctgacattttgctcaacaaattgcaatgcttaaaacaagataacagaactgctacttcatactatcatgatatgcatgcttgtttattacattgtggtttagatgaatgcaaagaagctacagaattgatgtttttacgtgggctttacaaagaaattcaggacatgcttgattgtcaaagatatacatctctttcttatttgatacaacttgcttgcaatgctgaaagtcaaatagaggaggacatgaaaaagcaatacgctatgtttctgccttctattactaaccatttgcaggaagtgcataatgatagaaaagaggacaaaggcatggatgaaccgccaatcccattgttcacactcaaagtcgaggcacctccaccatctgaagagggcatcaaaggtaaacttaatggtgctaaaattaatcaaggtgagtgtgttgttaataaattgaatttatccacttttcatgctaaagtggagcaaccattagtggaaccaactgctgagattcctttgtcacaaactgatttgtttgctgttccttgtgataaagaagtgttgtgtgataatgcttcacttatatcaatgccacaactagtgaacgaacatgctatttctcatactagttctttatgtgatgattttaagcatgttattcacattgctaatgaagtagaggaacgtgaattgacatcttctttaaatactttgggctatattcagtgtgatgatttttgtgagctcgatagtttgaaggcgaaattatttgctaaatctgatttgccatgaccaactaatgctatttttcatatctttggtgaatataatgatagagaaatatatttggtgcatagagtttatatatgttcagatttagaacctcctatacatgtggataaaacttgcaagctagagagacatgttatttcttatcatattacttcgagtttgtcttgttttgtttggatgaaacaggttgttttaaatcgaccatgagatgagcaccatatggaaaaatcgaggacggttttctatgaagaaggggaggatgatgtgatcatggctactatggatacaaccattgcttacatcatggatgaacaacaagatatcaagttcaagccctccaagtgctggaatccgatttgaccccctgctgcacaactggcttcaaacggccaccgaatctacatacgacctccgttttcagcccatgagtactcgatggaaagctttcggagtcttctttccaaacgatccacctcatcaccaaattctttgtcagtcatgtgcaattgaaggaacaatgtgttgcgtctcttgtaatacctatgggcttgtaacttcgtctgggaacctggcccaagtggggcccatgtggggtgcgcctcaaccaggtagaggacgacctagggtcctcccatctccataaatagcttggtaccccttcatggtttcttgggttttgttagattaaagtttagccgttgctacttgcttgcagcacgcgtgtcggctagaccgtccgtctgcctgttcttcgtaaccccaacttatcatttgtgttcaattcctatttgcaatatctgattgcttttatcttgttattgcttgtttcttcgatttgcttgcaggaataaggttgatctgcactggcaagatcaacaacccacggaaaggtgtatcgatcggtaaggtgcaacgcaacttcttgtacggttatagtcggatcgtcaacatgtctcccaaatcatagttatcattaacttaccgaaagatctgggcaaacaactgccttggaagaacttcttggtcttcgggtctataggaatcttcttttcaggactccgaggcttgaagtgcttcctcacgtcctctttcaccgcggcgtcaacctcctcgtctgtgcacaagtatggcttcgtatagggagtcagccgtggttcaactttggccttctacatcggccttgacgtctttgcaagaggaggttggcgggaccttgactttgctagaggaggtggtgttgcttgccaactcttcgaaggtgcctgcggaggaggtggtgcagcttggcgagtcttggagggtgcaggcggaggaggtggcggaggagcacgcgaagacggtgcaggcggagacggaggaggcggaggagatggaggagtcagaggagccggaggagatgcaggaggtggaggagccggaggcgatggtgcaggaggaggggatcgagaatcgggaaacacgatgtagcgcttgcaccatagtatgatggcatggcttgtgtctcctagtttcatctccccatcctctccaggtatctccaactcgagatcctcctaggtggcttccacttgctcgatttcgaccttggagtacccaggtggaatcggcctgcaatggtatgtccctgtcggatccgttgggatggccatgcccgacgccaccttgtcaacagtagaggttataaattagtaatcaaactatgtgtgcaacgacatatggaatgtatacaagtacaagagcaaaccttgatggtcaagttcctgaagggaatatgcagctcgcacgatgtccaatgcttgattccgtcaacgggataggtggtttcttcctgagttagcgctgcttccatgctctatgatccaacctatcccgtagaggcgcaactgctgcgatttcctgagggactgaccattacaggctcctcctggctccgatgtgcggccagtcgttcgtccaccttccttaccacctcttctatcctggcctcgtgcaacaaaaccctgtattccaggtctacgatcttcgcctccgtgtctctcttgctcctgatccgactactgtacgtgtggctgtcctccttgaatcctagtttccaagggacgaggccttttcctcgcattcgtcctgaatgctccggattctgtagtgcactgcgacccatcggcggggtgtctcagcatcccatcttgttgacgttcttctgcgtgccatcgcatcaatcttgcatgctctttgttcctgaacaaacgtctgagccgtggtattatagggaaataccacatcaccttagcaggaattctcttcctcgaaggcagtccgtcaacatcacctggatcatctcttctaatcttgtatcatagtgcattatagactgggcatgcttctaggttctcatactcctcaccgcgatagaggatacaattgttcggacatgcgtgaatcttttgaacttcaagtcctagagggtagactatcttctttgcttcgtatgttgtttcgggcaacttgttttcctctggaagaatgttcttcactagtttcaatagctcgccaaatgccttgtcactgacaccatttttggccttacattgcaacaattccagagttgtacccaattttttgtgcccctgttcacagcctgggtacaaaggcgtcttgtgatccgctaacatacgctctaatttctaagcctccttttcactttcgcagtcctccttgatgtcctgcaacatctgaccaagatcatcttcaacgtcagccccttccacctcgcacattgtatttccttcaaatccaccgtactgagcctagtgcggaatgttctcgtcttctacttcatcttcttccatttgaaccccttgctccccatgcgaggtccaaacattatagctcggcatgaagcccatctcgaacaagtgaatacgaatagttctaactgtggaatactctctctggtttttgcacttagtgcatggacaacggataaaaccattattcttcttgttagcttctgccactttcagaaaattatgcaagccatcaataaactcttttgaccgtcggtccgcgcgcatccattgccgatccatctacatgaaaagcacaaaatcatgaaaaattaatccacgaaattcaaaccaattaaacaatattaacaatagttatatataattattataaaataataccacaaattattcatgttttcattccacataaatattgtaaataaatatttaatttaaattaacttactttactattcttttacaataattttaattcattttctttctcatctcttttatcacaatttcctttttccaaattcaaaataatcaaattagattatcaaataataccacaaattattcatgttttcattccccatcattttaaagttgtaaaaaaatatttaatttgttttacttaatttaatttaaattaactaagttttctaatctttttcatataattttctatgtttttctttctcatctcttttatcacaagttttttttcccaaattcttcgctgccactggcgttgttggattcatgggaaccattccttgtcttcaccatctgaaggggcataggtagaaatatgagaaaaggaagaaaaacaggggcttagaaactaatctttcttataaatttaagtgcaattatcttaatcttgattaaaacattgaaaaaggaagcaaacaactcctaattaaggcagtgtcacgcccagaaatttagcccaaatttccagactattttgtgtattaaatccctgtccaggaccagctagggtacacaaaacaacaagtaataaatagttccaaacgtaaataaagcgtaaattgcttacagaagaggcacttagtcctcacaccgaaacaaaagcagcagcagcggaaaaggcgatcctagcggggcttcagctccactccacaggcaaaactcaactggggtcttgagcctcggtcttctaacttcgtcttcagctcagaagcactacacttctgaaaagggggaaataatagcaagactgagtacaaccaccatactcagcaagccacaccaacgatgcagacgtgcaaggggaacacaaggacggtttgtggctatttgcataaaggcggttgtaaaacatttttattgagcaaaacagtaaaactgttgagtaattaaagtaaattagatctccactgatcaatgctacaccacatccaaagttggtatcagagccgaccttgaccgtaggacaagccaaatagaaaaacctaagagccctctgaatccttttcattgcatatgttctttgcaattggatttgttctgggaaaattgggatctgttcttgtggtgcaagggaaaattttggtcgcccgtttaagtgggatttgccaaatcaggtcagtctagggttttagtaaaattacttgggatttattcgacagtcagtcgggatttgatgggaggaatgcattaggtcctaactcaggaatatgggttgcaaggtatttatgctcttattgttattagtatgtatctaattttctcattattttatcgctatgtaagttcgtcttatttattcgccttcatgcaaaaatgatctatgcataaaattccgctcttattcgcttattttaattgagtcttttactgtttcatttaaattggatttgagcatgcattgatcctacccctttgtcttctctagatggccgatcacccactcaaccatcgcggagaaggcatggatgactttgtggcagagttggctcgcatgacactggtggtggactaccccaatgcgccagagtattcgactgttccgccgctcagtggcgagttccctgtcatgtcccaaaacgaccctaaaatatatcctttaaattatgcctagaataattaaaatccgtgtgaaagcctccaaaaattaaaatgtgcagagtaaaagtcaaataaggcttagaggatttttgtatatttcctaaaagcctaaaatgtgtaaataaattttagtggaattttcagagcacaaattataattgttaagaaataaacaaagttaaaaaggttttataaaaagaaaaaccctaaaagtccccttccctctcttgggccggttcagcccatctccctccccctctctctctcctctccccgcggcccactcggccttctccccgcgcgcgcgccgctgacgggtgggcccgcccgccaccctcgctgacgggtggggcccacccgtcatccccatcctcccgccgctcccgccgccccgcccgcgccaagcaccgccgccgccgccgaatccgccgcatcccgccgcccccgcgtgcaattaagtggggggaaatattccccgtgatcccctccccctttccccccatttttccctctctctctcgcattcaaacggccggatttgcttccgcaaatctcgccggcgccattgatggcggccggacctctcggccggtttccttcctctcccggccgccctctcccccttccaaccctatttaaaccctccccgcgcctccttcgcctgtttccaccctttggcgcgctgtctccccgccggaatcgagctcgcgccgtcgccctctctctcctccgtcaccgacgacctccggccggccttttccgctcgctgggactgtctcccgccccggcgtcgcctcctccggcttcgccgcagcgccgtcgaccccgtccaccccctcgccgagctcgccgaccgctggagcgccgtcgtccccatccacccgagctgcgccgccgccttcctccgctccggccgccttttttgtcgtcgccgtcgacccagggtaagccgtggaccgccgcctcttttcctccttctcttcccctctctcggccgccgctccgctgtgcctatggccgccgccggcgaccataggggcgcgggtgccgcctcccgccgactgcgccgtcgtggccgcctccgggcgcgccgtgtggctgccgcgtggggcccagccgtcagccgcccgcgccctcgggtgcggctgacgcgtggggcccacggcgccggccggtgtgagccccggtgcgcccggtccaccatggaccgtgaggctgccgcgtgggccccactcccgtggacccggtccgtgcgccctctcccctcggctgatgcaataaatcctttttaaattaaaatttaaataaagaaattcgcaaatattcacttaaagagcatataaacttcaaatggccataacttggccatttgaactcggaattggaccgttcaagtctctaatttttccttaagaagtcaagaacccatttttgtgctttgttcctgcttgttatatggagtttactagagtaaaagcctttttcctttccgttggtcgtgtagacgctgcagctttggaagatccgctcttcgtggaggttgaagccgacgtttgggaaatcgagcaaggcaagtcacatcatccttgagcatattgaatcccagtttataaaattattttgatttaaattattgcattatcgctttatttaaattcccgcgttatcactgttttatttagccatgcctatttacctttgtatgaccttattattattgttattgttattattaccttgttcaccctagaataaacaaaaccccaactagtggatactctattcatggtacgactagtatgaatttaggtagatgcttcgctgtttaattaggcaacattaggtgattttacaactctagactttgggaatattcatatcacctggacactatggaatggttggattattgtggaattggattcacacctccccctctattcaaaaccctcaaaatggttttaggctgggctcggggtgcatggttttgatagtagcaccttggccacataaggaccggtcttcgggcctctgttgcaaagcactaccgtacttccacatgtctagtgggtaaggcttagtttgtggctcagtctggttataaacaaaagtacacggatggagatggacgaagtcgggagtcgatggacatctctagggcaaatgaaggctacacgagctgcggcccggtagtcgagatgtcatggcacagggctggtgtcctgctgctaggggctcagtcctgcctacctgtctcggaggttccagccgtaggtggggttgggtcggtactcttgtctatggctaggatgggttggaaactatgtcatgtcttccgtccgtatgccgtggtggtatgtggcacgtggttacacgtgaagaagacatgtcttgtgggtaaagatgtacatctttgatcagagtataatctattcgaatagccgcgccctcggttatgggcaagcctagcaatgtacccaagttagtgttttaattcttaaaacctacttaacaactaaaatgtggaatggttggcctgggttggcttgggacgagctgggacccagggtcgggttgccagttcggtctgaatcatcgtaggccttgggttaaggcaggttcgtgtgggttcacggccttgattaataatcttgtatatctctaggatcgtgtttaccaaatagcttgagcaactaagtgtcttttaatgctgtttactgcaaaccctaaccccctatattatgactcccttgtactcccttgcatttattctgcacttgtcggtgtgtcttattcagtacggtggttgtactcagtcttgctcaatttttcccaaacccagaagaggagttcctggatgatgaaggctttggtgtctagctcgtgcctgccatcaagcgcctgtggtcgtcgccctagtcttccgctgtttttcgtttgtcttcatgtgtgctaggccttcgccgcccatgtaataaattaactatttacgcttccgcttgttaaactctgtattgtatcaacttttggtgtaccttgcctcctgggacaaggaataatacatgcacgtaaggaacgcccattgggttatttccggtcgtgacattccctcaccgtgttcgcctggaggttcatggctatgtgggtacctacctcgctaacatggtggttgaggcatccggaggcacaacagatcacgcctgtcaagaggcagcatacctgatgatggccagactatgggagcgccacaactacatcttctgcaacacggcgtaccggtttcaccctcgtcgagcaagtggcgatgacgtcagtacctttcgtccgacagccggcgagaacgacaccacctttggtcatatgtgtgccgtgatgagggtaatggacaggatgcactcggatctgcgcaaggcgtctaaggccttgaatgatgggaagctcgtgaggatcatagctctgaaggatgagatcgcacgcctgaagaaggagaatgctcagttgaagggtctccccattcccggaggagtccggatccgcaacacgccccgcaagtcgacgacggcacccgtgcgcattcagcttgtgcccaggaacccacctccgcccgcagttcccgcagttcccacagttcctgcagctcctgcagctccagctccagtcccagctcctgttccagtgtcagctcccgcgtccgctctctccttcgctccagcatcagccgtcaggggtccagccagtggcaacgggggttggttgcctgctactcccagtggcaaccgcgaccacagcagcagcagttcaagtggctcggagctgtgcagcggcgagacgtatctgccagactccaggagccgctcagagggacctggtgacgagcaggaggacgccttcgactccaccgaccgcaggagccgttccgagcattaggctcgctttcccttagtttatcgactgcttagtttttgtctgctagtttgtgtgtttaggtctgtttgcttgagggttagtcgacggtcgatatcatgtgcctatgatatggctgtcataataaggatttgcctgctgttttaagtgttttaattcatatctaattcatccgagctccgtttaagcccattcaagtctcagtaaatcaagaaaaatgtgtagaatccattataaatggttttgttctctgtttcaatagtcttatagcctgtttgtattgtttgctttgtatgtcgcttagatttcggctctcccgacgctccggtgtaccttgaaatagtcgccgaagttcctccagctgcagagcaaggcaagtcatgcttgtcactttaacatgttgatcctatattgcaaatgctccattgttttcttcaaatactacgttgttttataatatcaccgtgggatgtttacctactgtcatagccatgctatcttgtaccatgttcctttgttagcttgggatataacatgactagagattggactagggaatgcttagctttgcttagttcaactagcacacaatggggaactacattaaatgcatagatatcagattctaggattgatgttggttaatgctcaccgctccggtgtttgttaattaattaatattaaatggtgggccatgggtgcatggttttgatggtcgcgcccagagtaattaaggaccggttcgcgggaaaccctggaagaattcctcgtacttaccacaagccagcgtgggcaacggctgggcttgtagtgtagctttcctctagccgacgcatccaggcaagggtgggcatgatggagtttggatgggccttgcgacggcctatgcggcttccggattcacctaggcacgagaggggactgctcgctgccttgcgaggagtgggggtgaaacctgaggtgtggtgtgcttggttagagggggttatgcgaagggtcctgtcacggcctctttccggtatgtcgtggtggcatgtcggcgcacggaaacgtgtcgtggggctgtgtcttgtgggtacagttgtacacctctgatcagagtaaaactattcgaatagccgtgcccgcggttatgggcggtcaaccagattcaccgtgattagactcaccctagattattctaatggaattgaatagtataggtggatggttaggcctgttgcaacggggtatagcgttggacagtggatgattaatattgattaattattacaactgttttactgctttcatcttctgtttataaatgcccgctttatgcaaatgaaccattatagctatcccttgataattccctgcatcatacccctattccggtatgacttgctgagtacagtgggtagtactcagtcttgctctattttccccaaaccccagaatttgagtatgcgtcagatggtggtttctccgaggagtaggcttcgtccgtgccatcgaggatgcctgtggagtggtgttcccgctgcagtccaagtcaaggcttagctccagttatcctctaagttttccgctgcatttgtgtaagacttttataatgtttgtaagacgtggatctgtatgtcaactttgtcgtttgtgtaccccggcctgtcctagatggggattttaatgcacattctgcttggaattctattcgggaatttctgggcgtgacaggcagccataccactgacacataatatcgaccgccgactaacccacaagcaacaaacctaaaatacggaaactagcaagcaaacagactaagaagacgataaagctaagggcgatgactctgaagctcggagcggcgcttgcgattgagaaacaggtctgacacctaagatagacaagagataggaatcaacgcatgctcaaatccacatttaaacaaaacaacaattgactcaaataaataaccaagcatgatgatttttatgcatagaacatttttcctaatcccagataaagacactaatgtaactaactaaacaataaattaatgcataaaatagatgcatggaaaatgatgtgcataaaattgccccatcgaacatagacatgacctaatgcatctcatccgatatatccccgactgactgtcgaatactccaaataaaatttttctaaaaccctagacttatctaattttaaagatccgatccgaatgaacgaccaggatttttcccaaaaatcaaagaacaaaccccaaattttcccgaaacaaatccaagtgcaaagagcatatgcagatgaaaaggggttcagaaagctcttagggtttccagttggcttgaactacggtcaaggtcggctctgataccaacttgtcacgcccagaaattcacgaaccagaatttctaagctgaatgtgaattaaacccctgtccaggaccagctagggtacacaaacgacaattgttgacatacagatccacatcttacaaaaatataaaagattacagatgcagcggaaaaagataaagcgagctaaacttggaagcttgagttttgtagcggggcgactccactccacaggcaatccttgacggcagcgacgaaaccaacttcgacaagacagctcccactaggaagatcttcagctctggtgtgggggaaaagagagcaagactgagtactacacactgtactcagcaagtcataccagaagaggaagtatgatgcaggatataaccgaaggaggctaggggttcctttgcaataaagcagtagttgaaagcggtaaaacaattgtggtaattaagcaatattaaccaatcactgtccaacactacaccacattgcaacaagcccaaccaaccacctgtactacaccagttcattaaactaaactacgggtgagactaatcacagtgaatctggttgatcgcccataaccgcgggtatggctattcgaatagttttactctggccagaggtgtacaactgtacccacaagacacgattccacacatgtcgccatgccccgaagtatcaccgtgatactgcaaagggggaaatcgtgacaagaccctccgcataaccctcccctaaccatccacaccacactaaggtttcacccccacccccaacgggcagtgggcggtcccctcttgcaccgcggtgaatccggcagctggacaaccggacaccgcggccgacccaactccatcacgcccaccctcgccaccggtgcctaggaaagggtcgagctatacttcagatcaagcagttacccactcccgcttgtggtaagcacggtaagtctcccagggtttcccgtgaaccagtccttaattgccatgggtgcgactagcaaaaccatgcacccacagcccaccattcagtgtattttaattaactaacaccattgcggtggcaccaatccaaaactatgctaatagtcaaagtctatgtaataatgtgatccccatttctgtactagttgagctaagcatgactaagcatttcctaaacgaacgtctaatcattttgatacccaagttatcaatggcataaggtaaacaataaatggctaagtagtgggacccatcccacatgacactgtaaaagaatgcaacatttaatagaaatgcgggatatttataaattgggtacaatatgatcaattataatgcatgacttgccttgctctcgcactgatgagaccacagcaacgtcttcgagaaaccgcggatcgacgaaactgccgaaatctacgcgacaaacaaagcacacaagcaaaacacactataagactactgaaacagtgaacaaaaccatttttaatggattctagggatttttatgaatttactgagacttgaatagacttaatcggagctcggatgaattacttatgaattttagaagataaactgtgtttttactactaaagaaaaatccttaatcaattttattgcgcaatattacccagggctgacgtcagcgaaggggggcggcgccgacaggcgggccccgcttgtcagcagcacaaggggagagggagggggtgccgacatgcgggccccactggctgcggctcaaaaaaggggaagggaaagggaggcgccggctaggctcggcttggcctcaaggccgaccggccgaccaaggcgaggcggcagcgaggcacggccaccgacgacggtgacccgcggcgcaggaagcggcggcgacagctgaaaggcggcggcgcatggccgaagcagcggcgtggctcagcgcttgcgggaagggggaggaaaggaaggggagggaggccccaccggcgacacggcggctggagcggaaggcgaaggcggcgacgatgacccggcgagaggaggttcggacaagcggcggcgacacctagagaaggggaggagaggagttagggatggagaggacgaccgcgatgaccaaagtggccggccggagatggatgaaaatggagagctcaccggcgagcgagggaaacggggcttcgggggtgattggcggcaaccaagcggcggccgaggagcgagcggcactggcgagcacgacggcggcggtggcgtggcgcagcggcggctatagcggcggcggcgcgcggccggagatgggcggcggcggagctcaggtgtggtgatgcggcggcggtagagggtgctggaggggacggcgaatgggggaaacgagagagggggctcgggagagtgcttttatggatgagggaggggaggacgtggccggggatggcccctattgcaccggcgacgtgggggagtggggaggaagagagagagaggagagacgggattcaaaccgaatcccggcctctaaacgggcgcgcgtgcgcgggagaggtggaggaggtgggcggcgacgtgggcgcgagttgcgagcggtgtgggggcacggataaggcgggaaacggtggcggcgtggggaggtggggcgccggcgtgggcggcaggaggttagggacgaccgacaggtggggcccacctgtcggcgcccgagagagagagggagggagggaggacttcggggaggggaagggaaggagggggccggcccagcaaggagggcgcactggagggaggttgggccgacagcccaacaaggaaaaagaagggaaagaaatggagaaaaaggaaaaagacttttcctgggattaaatattgcatttgctcatttttaattggttaaaattacttttaaggctctgaaaattccactaaaaatcttgttagtgtattgtgacatgtggaacccaagaaaaatcgcacaatgccatttccaattattaattgcatttattacttagggatttagctccaggttaattaaaacaatttcttcggacgatttattaaacaatttttttaaaacaacggaaaggggaaacttcagggcgtgacatcgtctcaccaaatatcatcatattagataagaaaatcaggtataaacgtatcaattcaagcaacgaggtcactcttatttgaattcatgggacataataaaaatatgccagctgaggcagcgggtacttcgcattctttctaagagcatcaccaacataatgtgaataacccaccccaaaattttgtttttgtttcctaaattgaaggaagtggaaaaattcatctcttcaagagagagcctaaattgaattccaaaaagtaaaagtgaacccttctgttaaactaccaacatgaatatctagttttccgttttccgctattaacgtactgaagaggatcgcgctgtcctccaggcactcctccttgcccggacggtaatttttctcccacgcactcccagatcaatgctgatctgcctccccgacaccaatctgccccaccatcccctgtcagctctcctttccccctcccctctatccctcactgttgccgtcccacctctctttacatgccctcatcgtgttaaaagacaaagaaatgagtcgtcgatgcaacttcctccaaatgctactagatgataagtcttcggcggatgacaacgataaatttattattgagatggttcaaatagtgtacgatcagaacattaaataaccaaagcaagatgtgtctgtgtttggacatgagatgattaattgggtacgactggctggtcatcggagactatacgatgaccatttttctgaagaacctataccttcctgttcattttagccgcatgtgtgtattagtgaatagaattattttttcaatctcgatttgaattggtgatgcacatattaattcttatttctaattattgtgcaggtttagaatgagaagacctctcttttacacataatgaatttagttaaagcgcatgatgattattatgtgcaaaagaaaaatatggctggtatccttggctatcctgtttcaaaaaggtaacatcagtgtatggatttgataaagtatggctgcgttaataattatatttattttggaacagacgtattaattctgaaagaaggaaatctcctaattaaagaacattactattcacacatcttgagtcttcactccttgttctttctcttttgattagtcatgaccgagccgtccttgatcacttaatcatgactagtaatatgcccgtactaacgttacggtggtaggattttagttagtgcacggacaacccacaaacttgtactagctctgtcccaaaataaaagagattttggacggatgagagatttcatagtaaatctggataggaaatctgtcagattcatagtactataaaatgtcccatccattaaaaatcccttgtattttaggatggagggagtacaagtatgtatgacaagtcacgatggtgcctacgtgactgtttgactcacatatcagtcatatacaaaataacattaaaaaacatctcttctcctatctctctccactctactctccttttttttcctacatgactgatatgagcccccactaacacataatcactacacacagcaggtcaaaaataatggcagcacatcctccttgccgtaggtatgactacataaacatagtctaggacgtctttttcggcaatcacaccactttactgattaagtagcatcactacagatcatcccatgaattcagttcgggatctcaaatcgatagaaattacaacgggtgtgctcatattaacgagccagataatgcaccgctgaatcacacaagcgttcaacatgtttaaaagaataagacaggaacatagcagcgatctccttgatagcatcaatctggcagccaacttcataacgatctttcacaattgaatgaatgcgatgaatagccgagagacaatcggaagccacgatccccttcagcctccatcccctcagtcctctcatttcatgcacggtcagctcaaatttatagaattacaataaaagacccaagtcaaatttggcagtaaaatctttatttgtttgaggatttagaaccagaggacatctccttaatctacagcctgctcagctgctccttaaccagcacagtgcagcgtcaaggttgcacatatagtgccctaacccgccagaagctcaatattgtagcctaacccaccaaaatttttgcaagtgtaaataaatcatccacctccagtggcgaagccaccgggggtgccggggtgggcctggcaccccccatccctatgcgctgcaaattaaccccccggatgattagccatctaatccatacaattaactcattagttagttgcaagttgagtctatacataactgaccaatagattttagctttatgtgattacctgagttaattaatgtaactaagcgatgtggttgcgagtctccaaaactaaaacggatgaatagaaatgatgtcttgtcactcatgtattcagtaaatttggtgctatttagttgcctaatttaaaaaatgattcttttatgttatattaatgtgcattctgacatacaccctccatcctaaaataagttcagttttttacatgaatctagaagaatgtgttgaaatatatccaaagtcatatcaacaatcaatttatttacatattagtgcaaattaaccacaaaattaaaaatataattatacgaggaacgactacgcatattagagtgaacaagaggtgaggtgaggccaatatgccactcagcatgacctgagccatcaagatccacaccgttgtctatcgaggcgctggcgagttcttacatttcgtggccagcaccccgtatcagtattacttcgccactgttcacctcccagaacgcaaacgccaacattttgctcagttgtcaaaggagagtatctttccgtagcacatcttcaaatatgcataaagggtataaatgtataagaacatgtcatgttaacataagatttttagctgcacaggcaaaaatgtaaacaatattgatgaacttggagtgcagctcccaataatgctgtacaaacaatatagcagagttgggatgattgtgtggtcaagctctggaaaggtgcaagaccagttcctcggccaatcaagataattggtgaaagtgaaggatcagcaggatgtttaaattaagttcgattttttttttcaaatgatgacaaaggtgcaacaacaaaaggaagttacctaaaatgagacgacagctcacaggtcattgtgtgttgaaagtaatgatacggtaacttgtgttggaaatttggtcataattccacatattttaatccaaaatattaagacaataaacataacatttgcaatatgagtagatctagtgacagtgctagatgtatataacttgagtatgcttaatatgaaataagcatcaacatttacatagtatcgcaatgctgccattgcaaagagtattaacaaagaaacatctaatagaatcgggagaatgaaagtataccccgaaaacgtcccaccgctggattttgaggcagtattgcctccgttgatgtcgttcatcttcttgtctccaatctccgttgacatcttggtgaaggcgccgatgtagcagcagtagccgcgaagaacgagagcagtcgcgcttgaagcgctacccaaaaacttgatcgcccgcctacccgtgcaggttctcaagcggacggagcttcggaggcacctgctcgttccgatcacccgtgcgcgcgggatgaacagaaccggggaaacagagagacagcgcaggaacaaaaggagagtatcaccaaggaacaatagtaggaagaagacacaccctttgagagcctctgccttgcgttatatgtagagagagagatatccattaccacacaaataaatctcatttgttgtgaaggttgccacaaaataaatctcatttgttgtgaaggttaccacaaaataaatctcatttgttgtgaaggttaccacataatgaatctttcatttgttgtgaaggttacaacaaataaatctctcatttgttgtggatgttacaacacaatgaatttctcatttgttgtggaggttacaacacaatgaatctctcatttgttgtggaggttataacacaatgaatttcatttgttaatggtgactttattctcatcggttacaaaacggaagagcagcaggcaggctcggtcagccgcctcgcctcgctacgcccatggccgaggtcgactcggcatgcgtgcatgcgtgtggcagtccaactatcacctcaatcggtcaacagagaatctctaatatcaccctatttaagttgaggtttttctacctaaattttcaaggcagtattattctctctaacattacttgtgggctcttgagattttaattgaattaaattgggcctagcccatttattccaacaatccccaccaaatttcatggctcacaagaaatgttctcaaaactgaacctgttagttataccagtgtttcgatggagactgttaggttgaacttccacctaggaaaagagctataccagatcacaactgaacaatggactatgccttgaattgtcaatcttgtgcgattcagatttcacttaaacccttaactagtactaggctgtcgtttgcatcccctctgtttggagcgtaaaagtcatactcctggccttttcatgagtatctagagatcacccagatctcatagactgtgactagcagtcggattcatataggtgtgtttcttctaagatgttctgtaggccaacatctctgctttatgaaaaaccactcggatcactttaaggtgtatatcatcctaccatacagattagaagagaagtgcatcatgaagataggttcattttagggtctcttctctcagctacacaatagtttatttcgccatccaaattcacgggatctccgatcacaatggacaggtttccactattgtgcaactctaagtgggtctcaagcccatctccctcgatgcatagtctatcacattacgtggtagccccttggtaaactgatctgccagatttttagtcgtctggatatagtccaatgctatcactccagagtttttctgctttctgacagacttcagtcttcttttaacatgcctggatgacttcatgttgtccttcgaactgttcactttaataatcactgtttgattatcacaattcatcaggattgctggtactggtttttcaaccaccggcaagtccatcaggagctcacgaagccattcggccttaactgtggcagtatctaaagctgtgagttctgcttccattgttgacctcgttaagatggtctgcttgcaagacttccaggaaacagcgccccctccaagtgtgaacacatacccacttgtggcctttatctcatcagcatcaaatatccagtttgactcactatagccctccagcacttttgggtacccgacgtagtgaatttcatagctcattatcccttttagatagcgcattactctttcaagagcatgccaatgatcatctcccggatttgaaacaaaccggcccaacttgttcacagcaaatgagatgtcaggcctcgttgcactagctaagtacatcaatgaaccaatgatcttagagtatctcaattgatcccttgctattcttcggtttttccttaatagcacactgggatcataaggagtaggagctgccttgcagtcactataaccaaagcgactcaagactttgtccacatagtgagattgcacaagtgtaatcccaccctcatctcctcttagtagtttaatgttaagaataacatcagccactcacaaatccttcatttcaaagcttttggacagaaagtccttgacctcctcaatcacattgaggctggtctcaaagatcaatatgtcatcaacatataaacacaagatcactccctctcccccaccatagcgatagtatacacatttatcagcttcgttcacaacaaagccagcagatgtaagtgtattgtcaaacttctcatgccattgcttaggcgcttgtttgagaccatacaaggacttcaacagcttgcacaccattcccttctgaccttctagtacatacccatctggttgatccatatagatctcctcatccaactctccattgaggaaagctgtcttaacatccatctgatggacgagtagaccatgagaggctgccagagcaagtagtactcgaatcgtggtcaagcgagcaaccgatgaataagtgtcgaaaaagtcctcgccttctttttgggtataacccttggccacaagccttgccttgtacttttcaattgtaccatcaggcctaagcttttccttgaaaacccatttgcatcctacaggcttgcacccatatggacgctcgacgacttcccaagtactattagaaataattaagtccatctcactgcgtaccgcttccttccaatagtcagcgtcaggagatgaatatgcctcttcaatggttcttggagtatcatctacaagatatacattgtagtcatctccaaaagactttgcagtcctttgtctcttactctttcgagttgctacaatgttatccttctcaggattttcctcaagtgtttgatcaatatgttctatcggcacaaagtgctcacggaataaaataggttcttgactagaagtgctaggtgcatttttcataggaaattaattctcaaaaaatgtggcatctctagactcaataattgtaccaacacgcatgtcgggtactccagaatttactattaagaacctatatcccacactgtggatagcataaccaaggaacacacaatctacggtctttggtccaagtttacgctttttggctataggtacatttaccttggccaaatagccccatgtgcgcaggtgagagagatttaatttcttcttttcccatttctcgaatggtgttacttccttatgcttagtaggaattctattcaggacatgacacgcagtcaatattgcctcaccccaccattccttggaaagtcctgcagtgtctaacatggcattcaccatctcagttagagtgcggttctttttttcggctaccccatttgactagggtgaatagggaggcgtcctctcatgaataattccatactcttcgcagaaagaaataaactcattggaaaaatactctccacccctatcagacctcaaccgtttgattttcctttccagttgattttctaccttagccttatagatcttaaagtaatgtaatgcttcataatttgttttcaataggtacacatagtagaatctagtgcaatcatctatcagtgtcatgaaatatttctttcccactttagtcaacacgtcattcatttcgcacagatcggaatgaacaagttctagtggtgccaaattcctcgcctaagatgccttgtgaggcttgcgaggttgtttcgattgaatacaagtatggcacttagagcctttgactaaagtgaattttggaattaaacttatgttggctaagcgtgtcatacaaccaaaattcacatgacagagtcgtttatgccacacattagattcatcatcatcattgcttacatggttcacaactttattacacatatcatccaaggaaaagcggaacaagcctccgctgtcataaccttttccaataaacgttccatatttagatatgacacatttattggattcaaacacaattctaaaaccatctctacacaatagagaaccgctaactagattcttctttattgaagggacatgctgcacgttcttcagctgcacgatctttcccgaagtaaactttagatcgaccgtacaaacaccatgaacagccgcaagcgatccgtttcccatcaacaaggaggaacctctcccgacctgataagaagaaaacagggaaatgtcggcacacacataaatattagcaccagtatcaacccaccaatcaggtgagtgacagacagagagaactgtaggtaaaaaattaccatacctcgatgttcctccgccctcactaataaccatgtttccagacttcttgtccttgcgctcaggacaatccttggcccaatacccagacttgccacacacaaagcaacctccttttgcctttcccttgcctttcttcttaaaattggttgtagccttgggtttgacgtcaggtttgactttcttgttgttgttgtgggatgcgtgagggttcttcttctgcaccaaattggcgctagaacctccctcgatctttttgccccggttgtcctttgccctcgccttctcctcaacacccaaagagccaataagatcagtaacactgaactcttgcctcttgtgttttagagaagtaccaaagtccgtccaagaaggtggcaatttggcaataatgacacctgccacaaacttgtccggcaactcacagttgttgttctcaagttcctttgccaacatctgaatctcatgagcctgttccactacagaacgatcatcgaccatcttgtagtcatagaactactccatgacatacagctcgctgccggcatcagaaaccccgaacttggccttaagagcatcccacatgtccttccctgaaggcatgtgcatatacacgtccacaatattgtcggcgagcacactgatcaatgctccacggaacaagcaatccgcagcctcgaacttagcctcctcctcaggtgagagaggtggttcactcggtttgccccgtgcgacaaagaaacaatgcatcgccgtcaaccacaaaagtgcacgtgctttccatcttttataatttgaaccatcgaaagcatgtggttttagtgatgcagcaaagccaactaccgaaaaagacctatcaagtttttggattgttggaaatttggtcataattcggcatattttaatccaaaatattaagacaataaacatgacatttgcaatatgagtagatctagtgagagtgctagatgtatacaacttgagtatgcttaatatgaaataagcatcaacatttacatagtaacgcaatgctgccattgcgaagagtattaacaaataaacatctaatagaatcgggagaatgaaagtataccccgagaacgtcccaccgctagattttgaggcagtattgcctccgttgatgtcgttcatcttcttgtctccaatctccgttgacatcttggtgaaggcgccgatgtagcagcagtagccgcgaagaacgagagcagtcgcgcttgaagcgctacccaaaaacttgatcgcccgcctacccgtgcaggttctcaagcggacggagcttcggaggcacctgctcgttccgatcacccgtgcgcgcgggatgaacaaaaccggggaaacagagagacagcgcaagaacagaaggagagtatcgccaaggaacaatagtaggaagaagacacacgctttgagagcctctgccttgcgttatatgtagagagagagagagatctccattaccacacaaataaatctcatttgttgtaaaggttaccacaaaataaatctcatttgttgtgaaggttaccacataatgaatctttcatttgttgtggatgttacaacacaatgaatctctcatttgttgtggatgttacaacacaatgaatttcatttgttaatggtgactattctcgtctgttacaaaacggaagagcagcaggcaggctcagtcgaccgcctcgcctcgctacgcccacggccgaggccgagtcggcatgcgtgcatgcgtgtggcagtccaaccatcacctcaaccggtcaacaggaaatctctaatatcatcctatttaagttgaggtttttccacctaaattttaaaggcagtattattctctctaacattacttgtgggctcttgagattttaattgaattatattgggcctagcccatttattccaacaccttgcgcacagaatggggtcggggagaagcaggtgggcagtgcaaaggtccggacggacgaaaacatcaggaggaggcgaggacagccagcgtggaaggggcagagatggggagcaggagatggcacatggcacagaggccctatcgaccgccgaggcatgcggcagggacccaaatctcgattctgctaaatacttccttcgtttcacaatgtaagtcattctatcattttccacatttatattgatgttaatgaatctagacataataaatctagacatatatatctatctagattcattaacatcaatatgaatgtggaaaatgatagaatgacttatattgtgaaatggagggagtacaaggcagccgccgcctccatggcggatctgctaggctagcggcatcgattagcaggcacagctcttgtggctgagcagcttgaagatgacagggaggttgcgaagggactgcggtcgccgaccttgatcaggaattcaagatcggtgaggcgatgaggagcgcgtgaagaggactgggcggaggcggtttcttctcggttgatgtatttccttcaaaataaagaaatatgtttgtttcctgcaaggtagagtaagaaattttacgattgacaattggcaaacattcggattctataattttcccctaaatttgctaagggcctcatcggttgccctatagcttaaaagccaaagccaaaatttgaattttaaaacttgattttgaatttgattttaatgttttttcaacatagttttttttcaactttggcttttcaatcactaacaacatacatacaaaagttttactcacatatcatttttaatcgctaataagccgttatgtcttataataagaagtgggcaaccgatggggaccaaaattttacgattgacaattggcaaacatttggattgataatttgctcgaaagagggagtttaccaagaggtatagatggccaaagggcccgctcggcacggcccagcccaagcacggctgggcacggcccagcagccatcgggccggcacggcccatgggctgcacctctcgccaaggcacggcccaccagctgtcgggccgtgccgtgccgtgccggcccgaaggcatgggtggcccatcgggcttttttaaaataagtctattttccgtccctcctctttgggctatttcatatgtatagctaaaataagtctattttccgtccctcctctctggctaacatatgtatagatagaaaggtctattttagatccctattctttcgtccatagcatataatatatctatttttactcccctatttttttttgtgtatcgggcctagctgtcggccctttgtgtcgggccggcccagtcgtgtcggtggaggggccaggcacggcccggtgatcgggccgggccagcacgggcccgacctccgtcgggccgtgtcgtgctggggccaggccaaaatgccgtgccatgggccaggctgtcgggcctcgggacttttggccatctataccgagaggaatgccctcaatgctgcagctagagcttgattgaccaggccactcttgaaatgcgatctggactccacaaaatattcgacgagctaattcctgcaaaaacccaaagagttaagtaccaagcgtatctccctttttggaggcaattcatgatccagttgttgtactcttcaggccttacctggagtgcaaggtccattgaagaatcaatctggaagacaacatacccgtcctttccccgtacctctcttattcgaaatgtaacgtccctcaatacccacaagagctgataacaaatcatcaataaccaaaagctcctgcaaatcaataacagatagattggagttacagttttgagttgtttgtgaaagctaaattacttcagataattttaaagatgtgcaaaatgaagatattacaatattgagcctcatagaatagctgcttaaagcaacatactgaaaatgcaactattttgtgacattgttacaacaaatatgctgtacttagcacggcatgtcagtatgtaatgaacaccaccgaccaacagactctgagaatcactcaaattcaaaacaaaagattcgtgttatgtaacaaaatattttattatctgaaactatatctactcacactacattgaccacatgaaccaagatatcaaaagaaaattctaacttagcaccgttacataatacatattgttttctgaattcaacgaagtaggaagtccaaaataaaatatacagtgtccaataacattcctacctccaattggaatccagactctggtcaacaataatttacagttcatgcacatgtagagagaaaaaaacacgacgaattcttccgagtaacccaaaccattgagctcgaattagaagtgtggaaccggaacctaaaccctagcatcggtccattaaaaaagtagtccctcgaagccaattaagccagctaaacaatctaaacgtacaagctaccagtacctgcactaagagggataccttgttgatctgaccacaatatagagcactcaagaaatctagaacgctcaagacgtgctcgatgaaatgcgtatgtgctgccaaccagagctagcaactactacttacttctaggtcatcggcggtgcgggcgtgggtgttccagcggtggcacggaggagatcggtggcgttgccctcgctggcgacgcggaagggagagatcggcgcgggcagagcagattggtgagggagttccgacggtggcgcggaggagatcggtgaggcagccgtcactggcaacacggacgggagagatcggtgactctcgtcggttagcgtgaccacttgggcctcggtggtcggcgatgaaggagaaggagcagagacgtggcgacgcggtggggaagttgcatgggaagacgtgagctggcaccgagaaattggggaagcgatgacttgacgacaaggcgacgatggtcggtagatggggtagtgatgaggcatggtggccgtggacggtgatgcggcagtgggggagggggttcgcgagtgatggcgactggcgagggatagtcagtgatctgtcgatgaaaaccgtccggcggcggcacggtggagaggcgaggggcggcggcgcggtggaaaggcggggggcgacggagcttgcagaggcgagaggcggcggcgcagtggaggggcgacggtgctcgcagaggcgagggcagcacggtggaggggcgacggcgctcgcaaaggcgaggggcggcggcgcggtggaggggcgacgacgacgatacgcagggagagcgaggtagcggcgatgatcgcggatgcggtttctgtggatgggagcggtacgcggtgggaggtgagggaggtatcgttcattggatttaattcggtggatgattctcgttcgttggatttgatgattgagtacataggtgtaagaatgagttggtgaattatagggtagatagatacggtgaaaaacatacttgttcggagccaagggttcccaacacgtgcagtgcgcacggaaaacgacatagtccattagagcaggtacaatagcagcctataagccggctgtaaccatatatcgagaagaaaagagatgagagagaagaaagcaggctacagatttatagccggctgcaacacggactctaagatattatgtgtgtatgagaggtgggaccgtatattaatagtgtagtatatttttatagttaactattgtatgaatgggctattagattggctatagatgttttggagccaatagctagctatactattgaccttgctcttagagcaagttaaatagtatagccaattgctagctccaaatcatctgtagccaatgtaatagccaattcattcaatagttgcttactataccattcatatctggccccatctgtcatacacacattacgtcttggagtccgtgctgcagctggccacagatctgtagcccgctgctcttttctctcttcttttatctctttaaaatatgtttatagctggcttatagttgtcacaccctgaagttcttttcccaagcctaaattgaatttataaatcatctagagaaaatatcggcgtaaaagcaagagagaaaccctaataaattaatgcaaataataatcggaattggcatgtggaatttttcttgagttctatatgtcaaaatatgctaacaagattattactggaattttcagagctctagaaataattttaaccaattaaaaatgagcacaaacaatatttaatccctggaaattcatttcccttttctttttcctttttccctccttttttcccaatggaccgccagcccattttcctccccgctgggccggccgaaggccacggcccagccggccacccgagcccccccttctttctcccggggtcgccgacaggtggggcccacctgttatgtcctcccccaacctccagccgccgccgcgcgtcccgcaaacgccgccgccccctcgctcccatgcctcccgggccacgttgcccacgtcgtcgcccacgtcgccgcccgcgcccactccctctctcccccgccgcgcccgcgccaaaacggccgggattcaattttgaatcccgccggccgcgccctctctccccctccccactactccggtgaaatcaggccgctcccggccacgtccgagccccctctcccctatttaaacatccccgctctcccctctctctttttctccatttcgtcgagctctcccgtgccctctatcgctctagcgccatcgccctcctctccaccgccgccgccgccgctctggtagccgctagccaccgctagctgccgcgccgagccgcgtcgtcgccaccgtcggcttcgcaagcccgagggccacgctgtccgcctctccgccgccgctttccgccacgggaaccccgttcgatccgcgcgccggtgagcttcaccatggccggcgccttcggtcggcgccctagccatccatggtttccctctccctctctaacttcccccttttgattcgttaggtgatcctggagctcgtcccgccgtcgccatcaccctccgtcactcgccgtcgtcaatcgtcgtcggtgaggcccctcctcctcttcctccctctctcccgcgccgcttagccgccgcgccgccgctgtcgccatctgcgtcgccgctccgccgccgccctccgccgccggccggtcgccgcctgtcgccgccttgcgccgccactgcgtcgagccgcgtcgccgtgtaccatggccgccgggccggcttgagccgcccgtgcacgccggccacgcgctcccgccgccgtccgatctaccctcgggtagatcggggccgtccaaccacgccacccgcgtggctgccacctggccgccacgtgtgcgccacgtcggcgccccgtgtgcatcacgtgatgcgccgctccttccctgggccgtggacccagtccaccgcggacagcccccccagtcattgccatgtggggcccgcatgtcggcgccgccctcgctctccccgggattcatatctaattcatccgagctccgtttaagcccattcaagtctcagtaaatcaagaaaaatacatagaatccattaaaaatggttttgttctctgtttcaatagtcttatagcctgtttgtattgtttgctttgtatgtcgcttagattccggctctgcggacgctccggtgtactttgaaatagtcgtcgaggttcctccagcagcagagcaaggaaagtcatgcttgtcacttgaacatgttgatcctatattgcaaatgctctaccgttttcctttaaatactgccttgttttataatgatactatgggatgtttacctactgttgcagccatgctacttttgtaccatgctcctttgttagcttgggatataacatgagtagagattggactagggattgcttagccatgcttagttcaactagcacactgtgggggaaatcacattaatgcatagacttcaggttctagtgtggtgttggattaaagccaccgtcctggtgttagtcaattaaaaaaataccatatggtgggatgtgggtgcatggttttgaaggtcgcgcccatggtatttaaggacttaccacaagccagcgtgggcaacggctgggcttgtagtgtagctttcctctagttgacgcatccaggcaagggtgggcgtgatggagtggggcgggccctgcgacggcctctgtcacttctggattcacctaggcacgagaggggactgcccgttgcccgctggggacaggggtgaaacctgaggtgtggtgtgcttggctagagggggttatgcgcagggtcctgtcatggcctctttacggtatgtcatggtggcatgtcggcacacggaaacatgttgtggggctgtgtcttgtgggtacagttgtacacctctgatcagagtaaaactattcgaatagccgtgcccgcggttacgggtggtcaaccagattcaccgtgattagtcttaccctagcttagtctaatggaattgattagtttaggtgggtggttgggcctgttgcaacgtggtgtagcgttggacagtggatggttaatattgaataattattataattgttttactgctttcaactaccttctttaaatgctcgctttatgcaaatgaaccgctcaagctgtcctttgattatatcctgcatcataccctctattccggtatgacttgctgagtacggtggttgtactcagtcttgctctattttaacccagaaccccagtgtttgagtgcgtgtcagatggtggcttctccgaggagtaggctttgtccgtgccgtcaaggatgcctgtggagtggtgttcccgctacggttcaagtcaaggcttagctccagttatcttttatttttccgctgcagttatgtaagacttttataatgtttgtaagacgtggatctgtatgtcaactttgtcgtttgtgtaccccggccggtcttggacgggggttttaatgcacattctgcttggaattctgttcgggaatttctgtgcgtgacaagttttaatgcgagccgaccttgaccgtaggacaagccaaatggaaaatctaagggccctctgaatccttttcgtcagtctagggttttagtaaaattatttgagatttatttggcagtcagtcgggatttgatgggaggaatgcattaggtcctaactcaggaatatgggttgcaaggtatttatgttcttattattattattagtatgtatctaatttctcattattttatcgctatgtaagtccgtcttatttattcgctctcatgcaaaaaggatctatgcacaaaattctgctctcatttgttcattttaattgagtcctttactgctttatttaaattggatttgagcatgcattgatcctacccctttgtcttctctagatggccgaccacccacccaaccaccgcggagaaggcatggatgattttgtggcagagttggcttgcatgaccctggtggtgggctaccccaacgcgccggagtactcgaccgttctgctgctcagtggcgagcttccccaccgtgttcgtctggaggtccatggctatgtgggcacctgcctcgctaacatggtggttgaggcatctggaggcaacagagatcacgcctgtcaggaggcagcatatctgatgatggctaggcttcgtgatcgccacaactacatcttctacaacacggcgtaccgcttccaccctcgccgagcaagtggcgacgacgccagcaccttccgcccgacagtcggcgagaaccacaccaccttcgggcacatgtgcaccgtgatgaggggaatggacaagatgcactctaacctgcacaaggcatccaaggccttgaatgatgggaagcttgtgaggatcatagctctgaaggatgagatagcacgcctgaagaaggagaacgctcagttgaagggtctcccagcggcaggaggagtccggatccgcaccacgccccgcaagtctacgattgctcccgtgtgcattcagcttgcgcccaggaacccagcacccacagctcctcccacagttcccgcagctcctcccgcagctcctccagcatctcccgcagttcccgcagcacccgcagctccagctccagtcccagctcctgttccagtgttagctcccgtgtccgctctctcctttgctccagcgtcagctgccaggggtccagccagtggcaatggaggttggttgcctgctactcctagtggcagccgcgaccacagcagcagcagttccagtggctcagagccgggcagcggtgagacgtatctgccagactccaggagctgctcagagggacccggcgacgagcaggaggacgccttcgactccaccgaccgcaggagccgttctgagcattaggctcgtttttcccttagtttatcgactgcttagtaattgtctgttagtttgtgtgtttaggcttgtttgcttgtgggtcagttgatggtcgacatcatgtgcctatgatgtggctgtcttaataaggatttgtttgctgttttaagtgttttagttcagatcagaacaattgcagtttaaattcctatataataaagcttagttcctgagcatctgtttttcttcttttccatcccctccgtctgctcttccttccgatggtcaacaccaggaatggcagccgtgcagcaggtgagggcagcaacgacgaagaacgcgccgacggtggatatcccaacagcgcctctggcaacggtccgccaccgctccccgagaactcgactcttgcacaagtgatggcccatcagactcagatgatggcggccatgatgcagcagcagcactagcagatgcaccagaggatgcggtagcaagccgagcagcagcagtagcagtttggtccccctccccctcagtccaagctgccaaagtttccacgagtcaggccacccaccttctctagcaccaccaaccccatggaggcaaatgactggctccatgccatagagaagaagctcaatcttctgcagtgcaatgatcaagagaaggtcgccttcgccacacaacagctccagggtcccgcgtcagcttggtgggacaatcacatggctacccatccgccaggtacggaagtcacttgggcggagttctgtcgcagctttaggaaggtgcaggtgccagacggggtagtggcacaaaagaagagagaattccgagcactccactagggcaacaggacagtaaccgaatacctgcatgagttcaatcacctagcatgatatgcaccggaggatgtccgcactgacgcagagaaacatgagaagttcctagcaggcctggatgacgaactgaccaaccagttgatctacggggattacgctgacttcgagaagctggtagacaaggccatccgtcaggaggatcaacgtaacaaaatggacaggaagagaaaggcagctcaattccgatccaaccaaggaagtcaccagcgaccgcgcttcacttccggacagcagggtggacctaccaccatgattgtttgacagcatcgtccttacaacccaagcaacttccaccccggcagtagtggcaaccatcttggccaagggcagcacaaccgcggcgcagccccacacccgccaatggcgcctgttcagcaaactgcacccgctcccccaaagtacaccggaggcaagccaggagcctgcttcaactgtggtgagtctggtcacttcgccgacaagtgtccaaagctcaggcgcgctggacccaagtttgtccaggctcaggttaaccacgcgtccgcagaagagacgcaagcagcaccagaggtcgtactgggaacgtttcctgttaactcaatccctgcaacagtacttctctattctggtgcaacgcattcattcatttcaaagaagtttgttgggtacatgggttaataagagaggaacttagtacaccaatgcgggttcataccctcgggaatagctccacctcggttcaattcagcccttctgtaacaatagaaatccaaagatcaccatttctagccaacctcatccttctcgaatccaaagacctagatgacattcttgggatggattggctgaccaagttcaagggtgtcattgattgtgcgaatcgcacggtcaccttgaccaatgagaaaggagaaacggtggtgtagaagtcaccagtcgcactaaaacagggaatctccttaaatcagattgaggtggaaaattcggtggtcaccgcggagaagagttcgaggaaattggaagatatccccatagtctgcgagtattcagaggtgttccctgaggacctcactaccatgccacccaagagagagattgaattccggattgatttggcaccggggactgctccaatttacaagagaccgtacaaaatggcagccaacgaactagcagaggtcaagaagcaggtggatgagcaactgtagaaacggtacattcaaccaagtacttcgccttggggtgctccggtcatttttgtggagaagaaggacaagacaaagagaatgtgcatcgattatcgcgcactcaatgaggtcccatcaagaataaataccctttgccgcggattgatgatctgtttgatcagctgaaaggagccagggtgttttccaaaatagacctacgatcgggctaccaccagttgaggattcaggaagaggatattcccaagacagccttcaccactcggtatgggttgtatgagcgcacggttatgtcttttggacttaccaatgcacctgcattcttcatgaacctgatgaacaaagtgttcatggaatttctggataagtttgttgtggtattcattgacgacatacttatatattcaaagtctgaagaagaacatgagcaacatctccgtctggtactcgagaagttgaaggagcaccagttatatgccaagttcagtaagtgtgacttttggttgtcggaagtgaaatttttgggtcacgtcattacggctcaaggtgtggtagtggatccatcgaatgtggagtcagttgccaagtggaccccacctaagacagtatcacagattcggagtttccttggacttgcgggttattaccatcggttcattgaaaatttctccaggattgccagacctatgactcagttgcttaagaaagacgagaaattcaagtggacagccgagtgtgacaagagttttgaggagctcaagaagaaattagtgtctgctccagttttgattctgcccgatcagacgaaagacttccaagtctattgcgacacgttccgtcacgggcttggatgcgttctaatgcaagagggcagagtggtcgcttatgcctcgcggcagttgcgtccgcatgaaggaaactatccaacacatgacctgaaattggcagcggtggttcacgccttgaaaatctggaggcattacctgattggcaactgctgtgaagtatatacggatcacaagagtttgaaatatatcttcacccaacctgatctgaacctccgacagcgaagatggttggagttaatcaaagattatgacatgagcattcactaccatccaggcaaagccaatgtggtggcagatgcattaagcaggaagagctactgcaatgctttgtgcaccgagggcatgtgtaaggaattgcagcaggtgcttgaacatctcaacttgggaatcgtagaacacaggttcatggctactctagaggctcggcctacgctcgtggatcaagtcagagcagctcaagtaaatgatcctgagatagctgaactgaaaaagaatatgagggtcggaaaagcccggggtttccttgaggatgaacatggcacaatctggatgagagaaagattgtgcatgcctgatgacaaagagctgaaagatctgatactcaccgaggctcatcagactcagtactccattcatccaggcagtaccaaaatgtaccaagaccttaaagaaaaattttggtgggccagcatgagaagggaaatagctgaattcgttgcactctgtgatgtttgtcagcgagtcaaagcagaacaccagaggcccgcaggattgttacaacctctccagatcccgaaatggaaatgggaagagattggaatggatttcataacaggtctgcccaggacatcatctagccacgattcaatctgggtagtcgtggattgactcactaaagttgcccatttcatcccagtgcataccacgtatacgggaaagaaattggcagagctatacttagcaaggatcatgtgtctgcatggggtacccaagaagattgtatctgatcgagggagtcagttcacctgaaaattttggcagaagctgcaggaagaattggggacccgtttgaatttcagcacagcctaccacccgcagactgatggccagaccgagagggtcaattagatcttggaggatatgttgcgagcctgtgcgcttgattttggtggagcttgggataaaagtctgccttatgctgaattctcatacaacaacagctatcaggccagtctacaaatggcaccattcgaagcgttgtatggtcggaagtgccgcacacctctcttctgggattaaacaggcgaacgtcaactattcggaatagaagtgctaatagaagcagaggagaaagtcagaaccgtcagagagaggctaagagttgcacagtctcgacagaagagctacgcaaacaaccgccgaagagagctcacttttgaagccggggattatgtgtacctccgtgtcactccgctctagggagtacaccgtttccagacgaaaggcaagttggcaccacgcttcgtgggaccatacaaaatcttggaatgaagaggagaagttgcctattagctagaacttccatccaacatgatcggtatccatgacgtgttccatgtgtcccagttaaagaagtgcttgaggctacccgaagaacaagccgattcggagcacattgacatccaagaagatctgacatatgtggagaagccagttcgcatccttgagaccagtgaaaggaggactagaaacaaggtcaccaggttctacagggttcagtggagccaccactcagaagaagaagcaacctgggaaagggaagatgagttaaaggccacccatccgcacctcttcaccagctcttccgaatctcggggtcgagattccgtttaagggggtagatttgtcacaccctgaaattcttttcccaagcctaaattgaatttataaatcacctagagaaaatatcggtgtaaaagcaagagagaaaccctaataaattaatgcaaataataatcggaattggcatgtggaatttttcttgagatctacatgtcgaaatatgctaacaagatttttagtggaattttcagagctctagaaataatttgaaccaattaaaaattagcacaagcaatatttaatcccaagaaattcatttcccttttctttttcctttttcccaccttttttcccaatgggccgacagcccattttcctccccgctaggccggccgaaggccacgcccaaccggccgcccgagcccccctcctctctcccggggtcgccgacaggtggggcccacctgtcggatcctcccccaacctccagccgccgccgcgcgtcccgcaaccgccgccgccccctcgctcccgtgcctcccgggccacgttgcccacgccgtcgcccacgttgccgcccgcgcccgccttccccacgcccactccctctatcccccgccgcgcccacgccgaaacggccaggatccaattttgaatcccgccagccacgccctatctccccctccccactactccggtgaaatcgggccgctcccggccacgtccgagacccctcacccctatataagcatccccgctctcccctctctctttttctccatttcgtcgagctctcccatgccctctatcgccctagcgccgtcaccctcctctccgccgccgccaccgccgctccggtagccgctagccaccgcgccgagccgcgccgtcgctgccgtcgggttcgcaagcccgagggccacgctgtccgcctctccgccgctgctttccgccgcgagaaccccgttcgcaccgcgcgccggtgagcttcaccatggccggcgccttcggttggcgccctagccatccatggtttccctctccctctctaacttcccccttttgattccttaggtgatcccggagctcgtccagctgtcgccatcaccctccgtcgctcaccgtcgtcaatcgtcgtcggtgaggcccctcctcctcttcctccctctctcctgcgccgcttagccgccgcaccgccgcctagccgcttagccgccgctgtcgccgtccgcgtcgctgcctagccgccgccctccgccgccggccggtcgccgcttgtcgccgccttgcgctgctgctgcgtcgagccgcaccgccgtgtgccatggctgctgggccggcttgagccgcccgtgcgcgccggccatgcgctcccgccaccgtccgacctaccctcgggtagatcagggctgtccaaccccgctgcccgcgcggctgccacgtggccgccacgtgtgcacctcgtggtgcgccgctccttccccgggccgtggacacggtccaccgcagaccgccccccccagtcaatgccatgtggggcccgcatgtcggcgccgccctctatctccccgggattttatttattgcacaattaatcaattaaggattttttctgtttatagtaaaaacacaatgaatcttctaaaattcatatctaattcatccgagctccgtttaagcccattcaagtctcagtaaatcaagaaaaatgcatagaatccattaaaaatggttatgttctctgtttcagtagtcttatagcctatttgtattgtttgctttgtgtctcgcttagattccggctttgcggacgctccggtgtacattgaaatagtcgccgaggttcctccagcagcagagcaaggcaagtcatgcttgtcatttgaacatgttgatactatattgcaaatgctctaccgttttcctttaaatactacattgttttataatggtactatgggatgtttacctactgttatagccatgctacttttgtaccatgctcttttgttagcttgggatataacatgactagagattggactaggaattgcttagccatgcttagttcaactagcacaccgtgggggaaatcacattaatgcatagagttcaggttctagtgtggtgttggattaaagccatcgtcctggtgttagtcaattaaaaaaaataccatatggtgggatgtgggtgcatgattttgatggtcgcgcccatggcatttaaggaccggttcgcgggaaaccctagaagaattcctcgtacttaccacaagccagcgtgggcaacggctgggcttgtagtgtagctttcctctagttgacgcatccaggcaagggtgggcgtgatggagcggggcgggccctgcgacggcctctgtcgcttccggattcacctaggcatgagaggggactgcccattgcccgctggggacggggttgaaacctgaggtgtggtgtgcttggctagaggggttatgcgtagggttctgtcatagcctctttccggtatgtcgtggtggcatgtcggcacacggaaacgtgtcgtggggctgtgtcttgtgggtacagttgtacacctctgatcagagtaaaactattcgaatagccgtgcccgtggttacaggcagtcaaccagattcaccgtgattagtctcaccctagcttagtctaatggaattgattagttcaggtgggtggttgggcctgttgcaatgtggtgtagcgttggacagtggatggttaatattgagtaattattataactgttttactgctttcaactaccgtctttaaatgctcgttttatgcaaatgaaccgctcaagctgtcctttgattatatcttgcatcataccctctattccggtagacttgctgagtatggtggttgtactcagtcttgctctatttttccccaaaacccctgagtttgagtgcgtatcagatggtggcttctccaaggagtaggcttcgtccgtgccgtcgagaatgcctgtggagtggtgttcccgctgtggttcaagtcaaggcttagctccagttatcttttatttttccactgcagttatgtaagacttttataatgtttgtaagacgtggatctgtatgtcaactttgtcgtttgtgtacctggccggtcctggacggggattttaatgcacattctgcttggaattctattcgggaatttctgggcaatagtctgctattctacctgctcttagcgcgtgattaattaagtattagctagttttttttaaaaaaatggatcaatatgatttttttaagcaactttcgtatagaaactttggccctgtttagttcccacacaaaaattttataccctctcatatcgaaagtttgaacacctgaataaagtttaaatatagactaaaaaataactaattgcatgcacagattgcgactaatttgcgagacgaatattttacgcctaattttttcatgatttgaaaatgtggtgctacagtaaacatttgctaatgacgtattaattatgctttataaattcgtctcgtggtttcctgacggattctgtaattagtttttctattagtgcccgaacaccccatgcgacaccctatatattatccgatatgatataccaatactttactctcctggatctaaacacccctttctataaaaaaaatacaccgtttaacagtttaaaaagcgtgtgcgcgaaaaacaaggcgaagtagctaggaaccagcagttccgatcccagcagttccaaacacagcaattcttttttagggagtttttgcatgcttctccgtcttagaataaaatcattgtttatcctctgtcctaaaaatgaattaacttttgaactatcattacatcaaagtttataaaaacagataataaatatattgaactagataaagtaaagaataattgtatttggatttaacaaataaggggtatttttgttttttttaaaaaaaattgtcttgatatatttaggatgtataaaaattaaacatattatgagactgatatagtatggaggacaaatggtagcttagctatgaacccacgatcactactagtatcaggaaattttaagagtactgctataagtacgattcagctgtataacattgtagaaaacgtgtccgcacgaagcaacggaaaaaaagacaaaaaaattaaggaaaagttgagaaagatttacattatgaaattaattgaaatacaaatttcctggaatatttgggtttttttttaagtaggtaggagtataattaaattaatttacaagcaaagtaagtgtgagaaatagaacgatatggttggatttaatttttattaaattaaccatggttaataacaatctttgaaaatttgttggaatttatagaacttaattactaattttgataatacaaacatcattttagcatttatttaaataaatctaaataaaaatcatcatttctctgtggaccattttcagctttttttcttcttcagcccgcaaccgagcggcccggttttctctcttctcctcttcttcgtctcagcccgcaagcaagcgtccagcccaagtctattaagtcttcgcaactcctctctgtcgtgtgggccccaagcaaaagtctagcctaagtgttgtgttagacccaccagcccgcacgtggcccatcaagggtgaacggcccagcaatgatgtggcccaacgatggagactagcctaacgcgggatcgatctgacctgttcgttttgatgatggctcagatcggttccaaatcaatcaaaaccaccggtgcaaaaaaaaccctaaccctaattcatttttcccctcccacttcccccaccatcgactgcctctccccgttgcgccgcctctccccctctgctgctccctctccaccacttcccttctccctcctcccactggcggcgccactccccctcccctgtcctctccctaacggcggcgctgctccccatccccctctcctcccacgtcgccggcatagagcgacgacgcgagagtatgacgcggcacagtgatggcgggggtatggcgcagcaatggcggtgacggccgtccctccccctctccctctccctctccccatcggccttgatggcgggggtatggcatggcaacgaccacgggtgacgacggcggtgatgccccttgccagcaaagggctggacggacccgcgtagctcccacttgtggcttaatgcatgtgatccaaattgaaatttcccgttcgttctcttttggataactgaaggtgactccacgtgcgagcgccgacggacgaaaatggatgaaaattttaggtgattaatgcaaagttacccatttttttaagtagttaagacatacaactagagatatataaactagagatatataatcatagaccaatcaaaaaagaacatgtttatatatattgcagccgttgatcaattttaattgtatgtgagtcggacgattacctggttttaggttgtcaccgtcagcattactaaagctagtcacaagttgagaagaaaacggcaccctcacgagacagcagcaaaatgggacttaactggatgcgggcaaatacaggcgtttacagatgaaaagataggaggatttgtctccaaatatgtatatatttatttataggagtacctttaattttataggtcgatgttaacatcagcggagcacgacaatctacgctatctcctatcagataggttaagattagcatcagccgtgtttgtattgcttacgagatcgatggacctggaagcaacgcatagtatcagatgcagtcccaactgcaactgcactttaggactgcacaagatctcgtccattcaatttttcaatggaaggtccagattaaatgctacaataggcttgctataataattttatgctggattttccaaacgaacagtgtcttatcaaatttgggcctttggatttgtatcctacagctatagtatgactgcctaagttgcagtcatactaaggactacacaggaaccaaatccagcaatatctatctagctgtctagtctgctgtgcacactttagcaaaagaaacaaactactgcccattctcttctaacctcgttttcttttagatagggtgaacgaaaaaaatattatatggagtaatttcccttcaatgataatggttggtggttaggataagattggatgcaaatttaaacgaaaggtggttattggtggatgtaatactttaaaagtagatagaatattttgtgataaattttaaaacatcgaaaattgatacatttttaaataggggaggggggcgtatataaatttcaggacaaaagctataatatattattgtcatctccatctcaccaaatcccatcatactatcttcgtttcaggttataaaactttctagcattgtctatattcgtatagatgttaatgaatctagatatataatctagcattgtcctcattcatatagatgttaatgtgtctagatttattaacatttatacaaatgaggacaatgctagaaagtctaataacttggaacggaggaagtattagataacaaaatcaggtataaagcatcaattcaagcgataaggtccctcttatttgaacttcattggatataataaaattatgcctgctgaggcggcagtactatgcatttctaagagcatcttcagcagtagaatttattttgaagcccctaaaatcttattttactataaagttatcccccactaacttcttaagcttaacatacaaaggtgccacatcatcatccactaacaagatgacacatcattatccactaacaatcatcacatttaaacatcatgcaaaacatattatatctttatagtttttataatttaagagcttttcaaatacaaacatgttaaattatcatccaacataatttacataatgtttcaatgtatatctttattatgttttatgatatcctatatacttatatagtttatcctcacttaattagtgcttaaatgattaatctatggtccaaattatctttctccttttttcctctaattaagtcatatcacatcaatttttttagcctttagatgattaatctacagcccaaactatctccttacttttcttcttccatagagtcatactaccttactttttacgtttgaatcaccattttacatactatataaatttaaattatcataaaccacattaatttacttaatctgatgttatctaactatcttacatgttatttttttattgttatcatactaaattcccgtagcaacgcgcggggttttacctagtttaaatcagggctgcccccatttcccaaggacccaaaaactacctccaactccagcagtagcccctatttcttagtccctacctccaaaaaaaatacaatccatatacactacgtttaacaccacaataattcaaacataaatatttctaatgcatataatttaaccatacttaaattcgcatacttaatttaaccagggtgggcaggggtgccagggggagggatatgggaggagagggaggagcaccggggaggagagggaggggcgctgtgaaggatcgctgtggaggagagggcaccaagcggagcgattgaagacaccgctagagacaacacgcgcgggaaaaaaaaaggggaagcgcacttgggaattttctcccgcgcttctcccaccggggtgatggtggccatgaccgagcccttagtactggggacttggggaggtgatttgggtgccttccttttttggggctttagtaagggccccgttggatctcagtttttagcattaactctcaaaaattatttgagggctatatttagaggccctgctagagatgctcttaagcatcattaacagaatgtgaaaaatccacccaaaattttgatttgattttcctaaactgaaaataggaagggaaaaatctcatctctccaagagaaggtctaaattcaatttccaaaaagtaaaagtgagcccttctattaaactaccaacagaaatctcccatttcctctatcaccatacggaagaagatcgcactatcctccaggcgatcgtccatgccccgataccacgccgatctccctcgtgcgtgctccttgccccgacgacgattttcctcccatgcactccctaatcgacgccggtctccctccctgatgctaatctccccccaccatcccctatcagctgtcctttccccctcccctctatcccccactattgcagccccatctctccctacatgcccttatcgtgctaaaaaaacaaatagatgactcattgatgtaactctctccaaatgctattggatgggagttttcgtcggatgacgacgacaaatttatttttgaggcacttcaactagtgtacgatcagaacatggaagaaccgaagcgaggcaggtctgtctttggacatgaggtgattggagactgtacaatgactatttttctgaagaacctacataccttcctgtttattttagacgcatgtgtgtattagtgaataatatttgatttcaatcttgatttgaattagcgatgcacatattaattcttaacgcttattattgtgcagattttgaatgcagaagtcctcttttttttaacacataatgaatgttgttgaagcacataatgattattttgtgcataaaagaaatacggatgttatccttgggctatcctgtttccaaaaggtaacagcagtgtcacgtattgtacgctatggaatagctgcagatacagttgataaatatgttcgtattggagataatactgttattcagagtctcagaaggtatattaattgtagctgttgatgaagtttttggggacgagtacatgaggacaccacatgagaatgatatagctaggttacttgcaattggagaaaaaaaagaggatttccaggaatgttgggttctttagattgtatgcactgggagtggaagaactgcccgactgcatggcacaatcagtataaaaggaaagagtgagttcctactttagttttagaagttgttggctcatatgaccgatggatttggcatgcgttctttggtttacttggaactcataataatattaatgtgctccaacgatcactattgtttgcaaagctagctgaaggaaagactcctagagttaattatagcattaacagacatgactatactattgggtattatcttgcagatggtatttgttcttcatggaaaacattggtgaagagcatctagcttccacaaggcaataagataaaatattttgctaaaacacaagaatctgttaggaaggacattgaacaagcatctggggtgctgcaagctcgctttgttattgtccatgggccagtttgttttgggatccgttgactctatgtcaaataatgagagctttgtgtaatctcgaataacataattgttgaggacgagcatgtcgatggggaagatttacattatgatgagataagagaacatgtggatagtaactgaatttaagaatgccttgcaaattacgaaaaaaaattaaagacaaggcaattcacaaccagttacgagagaacctcattgaacatttgtggcatcatcatggagatcaatattgaacaatgttatttatttaagtttcactaaactattatattattgagattgtaataattagagatttatatacttattaattaggtctatatatattatgtatataatgacatatggagatatatttactattttaatttgttctctctgctcaatcaatttccccgcgtgtttgtgtcagtacagcacaatgcattccagtcgcagaaacattccaaatttaatgagtatgctgcaaattatgaaactttagcaaatgtgccccaaatatctgacagtagcctgtagtatttgcatattgatttgaataaccaaatacacatcagaatcaaaattcagcaacaactccagcagcaaaattctgtactacattgcagcagcagaaaaattctgcaacattcctacagcagcagcaattccagcagcagcacagcatatcagcagcagcaattccagcagcagcagtacatcagcagcaggagcagcacagcaacacagtagcagcacaccagcagcagcaacaatcagcagtagcagcacatcagcatagagcagcagtaacacatcaccagcacaacagcagcagccgccatcagcatcagcagaaatacaccatcagacaaggctaattcattaagtagtcttcagagctaacaaaatattaaattcgaaatccaacatctctagacctaacaaatattaaacacatcctcgcaaaaaaaatattaaacacataacatgtgtgccaaacaactaacaaattttggttgctatttgataagatgaaattatgcttcagccaaacaaaaagactcagaatactattcttcacacttctatattagtcttgctcctcaatggacatcactctagtatctagcctcataatcctatcttctactatcattctcttgaattcaaacatttctttctccaaatcaatctgctgttgatcaagtgcggatgcaactttgcatctctccgctctttgccactccttctccacatcagcctctttcttcttaacccataaatgatctaaagcatcaatttgtgattggtctgagtgttgacgctgtttttctttctctttcttccttcctgtaggttttcccgatagctgcataccattagctggaataagattctctatcttgaggaacgcagctctgaggaccaaaaggtgcagctatagcaggtctagattgggcatgggtcttatgtttcttatttatatttttctgagctgccttctgacttcgctattcaatccactttggctggtcctttaaaaatgtgtagcaatgaatgaactgaaaagacatatctttattgtcttcatttttatacaacacctaggcctgcagaagctgcatatataaatgcaaaagaaagttaagctaaaaagattactaaatgattaataagaatgtcatatacaatagttcaattatcaacttgtgctcagcgttgatgccattttgaggtctcctctcgatacgacatacacaaccaacaaacttattgacacactcttgtatagtggacaaacaatacatgagtgaattttgagagcgatctgaagtaaaatccttgtttgcatgaaaaaaaaagtcagaaatacggttccaatatgtatttcgagattgatcggaatcttgaatagcatccgtactaatatttacccatgctgagaccaataagacatcctccttcatactaaaattcttagatcttttttggtttgatctcacatatgcttccccttccccaacttgtgactttggatcttcgggttggctacctagagcactccaatcataagtagtgtcaccctcatttatcaagtttgtaaaatacgcacttccatccattgttcctgttcaggccaaatagttcatcaccttacttataatatgttcttccattcaaaattagaattccagcaaaatataaaacagaatttgatggacaacagttaccatgtatctgtattgacaaccatatgcatatccatgtgtcataaacaatgacaaactgaaatttttagttcacagtcactgagttaaatggcgaaactcaaccgacagccggcagtgtacaacaatgtaatttagttcatatatgcctcatttcttggaaatggatgcaatgtttatcgcggtcagcagcaatgaggaagaaaaaatcagttcatggcactttattcagttcatcagtaattgcagtcagcaaacacaactgttaatataattttatctgctcagtaaacaaatggatgcaatgtaactatcacatggatgctttttaacttttctatcttgctctaaattccccacctccccccccccctcccccatcttaacaactaattttggaaagaactgatatatatatcggaggaattaaacactggacagggtaaattaccaatataaattttcggtacaaaattaagtgtatgtagattattaacaaaataaatgggcagtcaaatggcgatggtactgtctagtaaagagtgtgtttcatggtaaagcaaaggtacagagagaaactcaatttacaatgctatgcatcacgctagtaaaattcaatcagtatatgtttgcccattgcagacaaattactctacaaatggactattcagtattgcatcaatttatctcttcatgactaggtttcagagtttcacttttcaatgtacgaaatttcagcaaagcattatgtccatttgacccattttttagttcaaccatttacatagttgcccctgtacgacacaaagaagttcaattatctatcaccacatatatatagaaataccagggatgctgaaatatcttgcattacaaacaatgtcaatagaacggataccatcatcttaatcgggcagcaacccccatcttaatcgggcacggcgtccgtcacaagctagaagtcactgatgtaaaaagttatctcaatcaggcaaatggccgtcacggatgaacctatctcaatcagaccctaattaaagtccgtcaccgatagctttgacccaaacgacttgtcaaactatagcctgtcacggatgacctatctcaatcgggcctaaactatagcccgtcacagatgacccttatctgtgacgggcattaactatagcccatcacagatgagtcatctcaattgggcctagttaatgcccgtcacagatgagtataatcccaaaaaaataaattttatttttggctagccttgccatgctgtcccgcctttctcaggtcaatcttttttttgtccttactcgtgtgcgcccaggaagttcacttcctaactatagcccgtcacagatgagtcatctcaattgggcctaagttaatgcccgtcacagataagtataatccaaaaaaataaatttatttttggctagccttgccatgccatcccgcctttcttaggccaaaaaaataaatttatttttggctagccttgccatgccgtcccgcctttcttaggccaatccttttttgtccttactcgtgtgcactcgggaagttcactttctgaatggtcacccatcctgaaattgctccaggccaagcatgcttaatatcaaagttctttggaaattggcttccggaagagtagttgtagcttgttggtatgaatattctattaatcctatcaaaccctgggccgggatatgtcacaccccaacatcccccattcatatacattcattcacatacattcattcacatacacaaccatcaaaaatcataaacaacaaaattgtataactcgtcgagatctataactattgtatcagtcctttgtacaaataagttcatttgaacaatttaaattttgaattttcaaaatttgacaacttcgaagaaaaattagggttaataaatgatttcaaatagaaaagtcaccgaaaccaaagttgtagagctcattgaggtgcaaaatttttattttggtcatttctccatctgactctatttaaacaatttgaaatttgaaattcaaagtttaagaaattcaaatagaattttttgttagggaacgacttcaactgaaaaattcatcaacaacaaggttgaataactcatcaagatctataacttttattttggtcatttttctatataacattttttgaaccgtttgaatttgaaaatatgacaacttcaaacaacattttcaaatactaaataatttcaactgaaaaagttatccacaacaaagttgaataactcatcaagatctataacttttattttgataggtgtcatccgtgacgggcttaagttttatgcccacctaatatgtttgtgcgaccatatctcaatcggacactttttcggcccgattgagatgacttccttgtgacggcccgctatttctaggcatgttagaggctgtcacagatagaaggcttctatctgtactagtgtgtgcatttgttcaatctcattcctgaaatataatacacagatgctgcactttgtaataaaaaaaacgcgaatattatggaagggtctaatatgaaataattagaagggtaaggcttcgaacccatataatctagccttaccaccttgtggagctagccggaagacctctcagcgtttctcgcacttcgtaatactaaacaatggtgtgcgtcgttgaggacatcaccgtgcgcttggggcgccatgggtgagggcgattaccctcaccacctccggctccgcgattgctacctggcttgtggcagtcgtggtaaccgcaaagctcacggtctgcgcgttgtgaaggcaccgctgcaaactactacaccacactgacgaaaactaactgatggccattggaatctcagtggagtacagtgacactgatttggcgccgcaggaggaccaaatggccctggaagccatccttcgtgccatgccggtagagatgatggcgtccctttgctgccacgaaggaagcctgagatgcgatcaagttgaattatatggaatggcatcgaccacgtctggaaatccaaggcgtagaaactactgaaggaagtgtgatgcaatcgagttcaacgacagcaagtccatcaaagaattcactctccacctcatgggcttgtcacactttccaccctcagtattctgatcgaagagatcatggtagtggaaaagttcttgaatgttgtgtttgaaaacctctcgcaaattgccctgtccattgagacactcctacatcttgataagctttcgctcgaggaggtcactggccacctctccggaatgttaaggagagaagctggctgtaaggccacaacgttaggagacaagtacttcttacggaagatcagtgaaccacaaactgcaaggacataatagttgaaggcaagggcaaagagcggcggtggcaatcatcaaaagatgaggaggccgaaaaaatagatgcacacgatgacatgaagggtgggagcccaaccacaacaattgtcacaattatgactgtaacggtccttcactttatcaccgagtctgaaattcatctataaaacaaaataccaggtataacgggtttctcagtttacaaaacgggatcaccctacatactagccagtattatagccgtttttagctgacgtgacaagctgagttagcgtgggacccatctgaaccccacatgtcagtggaaaaaaattaggtaaagactgggtgcaaaacctgccctatgcagcccccgctccggagtccggacggggctagctaatgagcgaggagcgatcgatccccatccaaccctatacactcctctcccccttcctcctccccttcttctcttcctactacatcataaattttaaataaaataaaaaacaaagctggaaaaatttatgtatagaaataatatatatacactcctacaacatcataaattatatatatatatatatatatatataatatttgaattcaaatccaaatttgaaacgggtatgtaaacttttgacttataaactttggctttataaactttaggtgtataaactttagatgtatagaaatactatatataaaaatatttgaattcaaattcaaattttaatcggatataattcaaattcaaatttaaatcgggtatgtaaacttttgacttataaactttgggtctataaactttaggtgtataaactttagatgtatagaaatactatatataaaaaatatttgaattcaaattcaaatataaatcgggtatataaacttttgacttataaactttgggtgtataaaatttaggtgtataaactttagatgtatagaaatactatatataaaaaaaatatttgaattcaaattcaaatttaaatcgggtatataaactttgggtctctaaactttagatgtgtaaacttgatgtgtacatactttagatgcataaatttactaaaataggaaagtaatacgttgaccaaaaaataccaggtggagggaggggatccgatcgccccttagcaatctcggctccggactgttgacacgtgtggatgacatatccatcgaacggtgcactccgttctgctccaggctcaccacgagcgcgatctcgctctgttcgtgtgtggctctcgatcgctccgagctcgatctcgtcacgacgagttggggttcttgatctggatgaggtatagtaaggagtcctccaaatcccagttcatggcctcttgtggttcgcttgcagcattgctgtcatcgcggcaacgcgctggcgagacgaggggagcccgagcatgtagatgaggtgggtgtgcacgcacgccgatgactccgccggccggcctgtgccgaatgacgcgcgtcgtcgtgctgtacgtactactctaaaaataaaatccgaaaccgcgataatcagatcacatagcagccgcagcatcagcgtgcacataaatcaaatcaatttatgatgatcttgagccacaatttggtttacatcaatcattttcgagtttgatcgagtacgtacgtgttttttatgtccaacacgcgcgatcagtccgagcagcggctgctcctgtttctgtgttcacctcacgcaacctcaaatcgatcatgatcaacacatcagctgcccctaaaatctcaactctctctcactgtcagccccgccatcgccgactcatccacgtcaagatcaatgcgactgcaaggtctgccactcctggagcacctcctcatgttcctcccacctctacgtccacgtccaagttccgaccaccgcaagtaatacgtacacaccaccaaccaacctacatattcctcctccatgcatgcacgcgtcgttggagctgatgacgacgatgcttacaagcatgtaaacatatacgcaggtggagagacgacatggaggacgacgtggtgttcatccgtgggttcatatcgtcgtcggtgttctggacgcgacgcggtgaaaggtgttcccggcgttaagcgaggcggcgagggggaggtcgtacatgatgttcgccgtcaacctagctacgggagtgggggttcggtcggagctaggagccagtggaattccgctacacgctccgggagtacgttgagatgatcgagcgctccgtgctccagccaccgtcctcctcatcaccgcccgcagccggctgctgctcctaaccgtttgccgccggtcgccggcctgcagagtggtgagatgggaacagaggggaggaagagaaaggtgaagatagataagggtcattgacatgtggggtcacgtggatctcacgtttactcaacatgccacgtcaactaaaactagacataatattgcttaatatcttgggtgatccagttttataaattgaggtatcaattatatgtggtattttgattagaaatgaaattcagactcgacgacaaattaagagaaataaaatgaacttattctgcaaaaaagaaaaaatgacatcagcctaagaagacgcggttggagcccaccaaccccttgttgaagaggatgatgatgaacccactttgcgcttatggcccattttttcgagtccaacccggcgccctcggtttgaagtcattgccctccacagctggtgactcaagagctcgacctcgacaaggccaaggtttccgcgaatcttcatagggaggaattagctgaggatgatggtatttggcaccttggcacagttcacgagaacttcacaattagtatgtcgtatcatgtgcatttaaagtttattaatctcgtgatatgtttgtatttcctctgtttcaaattataatgcctatattttttttacacggtcattaataatatacttcgatcagtattttattccattatatgattcaataaatatgaaattagcataacataaaaatacttcaaaatatgaatctagtaatataacatgcataatacttagtatagatataattagtatgattattagtcaaaagctaccgagtttaatttttcttgaaaagaggatgccctataatttgggacggagggagtactgtattatgaggacttgtaaagtccaacaaatctatccgcatatagagcaagtacaatagcaggctataagttagctataaacacatattgagtagatgaaaga
